United States Patent Application Publication US 2022/0184174 A1 - sequence listing, part 3

SEQ ID NO: 39 - DNA, 2268924 bp, Staphylococcus hominis
aacgtcaaaggagcaagctcctcgtctgttcgctcgacttgcatgtattaggcacgccgccagcgttcatcctgagccaggatcaaactctccataaaaatttatgatgtttgattagctcataataataaatagtgtttgtaacatttaagttactttattggaattaacgttgacatattgtcattcagttttcaatgttcatttaaaatgtaatctattaaattatatcaatttcaatttcgaaagtcaacaactaatttcgattacttttaatattttatatcgtttttcaaatttatgcaatggtaaattttacactgaatttacattttttaaaatgtattaacacttcttgaaaacgacttttatatcttatcaaacaattcatttagtgtcaacaaattatttcgaaaaatttatttttgttttaagcaattcttttaacttgctcacaaaaaaatattctatcagaatttttatattttgcaatagcaaaagtgctcgaaatgatatttttttcgagcacttttacactaatgtttatttattattttattgttgtagcaatcactttttgtgcaattgttttatagatttttcctaatcgatcttcctcttgataaatagatggtgaaaagtcattaggattccaagaaggttgttcaagagggagttctcctagcaattgggtatttagctcgtccgcaagtttacgtccgccacctttaccaaatacatactctttttttccagtttctttactttcaaaataactcatattttcaataacacctaaaatagaatgctctgtatgcttagccatagctccagctcttgctgctacaaatgctgctgttggatgtggtgtggttactattatttctttactacttggtaacattgaatgaacgtcaagggctacatcacctgttccaggaggtaaatcaagtaataagtaatctaattctccccatttaacttcaacaaagaaattcgtcaacatttttcctaacataggaccacgccaaataactggtgcattttcttcaacgaaaaatgccattgaaatcactttaacaccatgacgttctacaggaataatctcttttccttgaacaccaggcttttcatctatccccatcatatctggaacactaaaaccataaatgtcagcatctatgagacctactcttttaccctctctcgctaatgctactgctaagtttacggctatagttgatttccctactccacctttaccagaagcaattgcaataaactccactggattattctgtgataataatccctcaattgtcttaggtttctctttttcttttcctgtatatttttccacaacttcagcaggtagttcctcaaaacgaatgcccactgtatttgctccgttttcttttaaagctttaaccactgacatttgcaaatcaagctgtggttgtcctcctaattgagccatagcaactttaacacttacatgttgaatttcttcttttatttttacttctacaattccctttgtttcttttaaaggcacattaataattgggtcttttaagtctcccactattttttttacttgttctaccgttaacaactcattatcccccttaagtttctttatatttacattttaacaaatttacttataaactgtgctgaatttatcaagaatttatagcttatgtttacttcttatcattcaagtcttcgctatctggataaaaaatcattttacataaatatagtattccaataattaatgcaataacccaaaattcaattttaatatatacgtaatgaatatgaataacaaaatagaatagaatagtcgtaatcacatatgaaattaaatgaaatagtgttccattaaaatatggattattaggtaattgctttctaaagtaatccattaaatgctcaatagcgaatagcaaaaagtatccaaatactatatagctaccgtaatatactaaattgctgaataaatccttattatatgtaaagaatcctaattttaaaaaaataagaattcgacttaatccaaataacccaaatcctaaaaatattaaaaatatacaacctgatagaataaaaataagaagaataagaagagtcggaaagataccattaaatttttgattagaaaatttcatttctctctttcctcctcttttcatccatactttataatgccactttatcatttatatatagtaacttaaaattattattttataccttctttattctctttaaataaaaatacccacattaaaattaatataagcgcaataattgtgattacagttaatatattatagaagttacctcctaataaaccaaattgaagtgcatataatgaccccatcaatgtagatcctatagatgatcctaaatttttagttaatgcatagaatgacatcatttttttcatatatttaggacttgtttcttcttgaacaataacactgtctttagtataaacaaagccaaaactcaatcctgcaagaatcacagctcccgcaataataagaggaatatgaagtccaaatactaaaatcatattacttaaaattaatgatatgaaagctccgatatatagtttttttcttgaaaattttgattctactttagctaagttgaagtttaaagctaaccatgcaacagaaagtggaaatataactaatccactttgtagtggagataattttaaatgatcttgtaaataaacaggtatatataagttataccccattagacatattgctataagtaaatcagttataaataccagtgaaattgatttattaaattcacttattggtaaaaaaggcatatctgttttattttcatatttgaataaaacgaataatataactattgctagtattaatgcaataatattaaaagtaacacctgttttatttaataaactaaacataagaagtccaataaaaatataaaacaaagataatccttttacatcaaagtgtatatgttgtacttccgcttcttctggaaaatgaaaagtaagaaaagctaaaacaatagctatcaatgcaattggtatgttgatataaaataaccaatgccatgttgcaacttctaatattccaccacctaataatggtccaagaatacttgaaattccccagacacttccaacgatgcccattattttgtaacgaagcggaatttcaaatgctagttttggtacaatttgagtcaaagacatcataactcctgcgccaagtccctggatggctcttgaaataattaacattataaacgtctcactcatgcctgacataaaacttccaataccaaataatagtatgccgactacagctatatatagaatcttaaatcttgtgagaagttcacccacaataggatttgctactacaagtgctataaaataaacggtaaagactaatggcactgctgtaccagcattcaaatctttacgaatggtaggcaatgctagtgaaataattgaactttcaattgctgccataaacattgttaaaaccaaagtcactacaatacctattgattttaatttcatctttgccctcctatatatttaaaaagttcataatatagaatatccttaattatattcataaacaattttaatgtattattaaaaaaagaaaaaacaggatagaattctttttgaattcatagtcctgtttctaaataagcacttaataaactaagttattatcaatgatataacctttcaactaggtctacataaaatatacgattcctataaaatgaaagagtgatgcaataacgataaaaatatgccatatcatatgaaaatatggacggtttttttgtgcataaaaccatgctccaatagtataagaaagaccacctaatacgataaataaaataaataaccaagatgttctaataataatcacaggtaaaaatataataccaacccatcccataactaagtaaacaattaagcttaatttggaatttacatgagttgaaattgacttatatagaataccccatattgttgttccccataataacaaaaagaccagccatcctaaccaacctccaacaactgttagtaagactggtgtatacgttccagaaattgctacatatatcatactgtggtcaataattcttaatatatatttatgcgatgtattatttttcattgaatgatatacagtagaggaaataaacatcatgaaaatactaataacaaagatagagacactaatagaacttagtgttccatactcattataactatgtactgctgcataaggcagtaaaaataaagtcattagtgcagcaacaccatgtgaggttgcattaccaatttcctcaccaaaagatagtggaatgatgtctttaaatgattcaattacattatcttttgtatgctgagatgatttagacatcgtattccaccatcctttaaattacattcattcgttttaaatcatcagttgcagtttctacactgtcttttccctctttatttttcaagggtgaaaattcttcttttcttggaacttgtaatgtaataaaactattcgcatatcggaaaatatcaaaataaaatagttcaaattttaaagatgttttttcaatcaaaccaaagtcatcatccagttgtttcaattttttaatggctaaatgatatggtaaatcattatttaccgcttgatttataaatgataacttaaatgcgtgaatgccaatatttgcattatcaaatgtattcgctacattttcatcaagttctgaatattcaagtacagtatctttattatctttactaactaatcgtccaacactttcaccctttttaggttgaatagatttagatgtgatatctttatcatttactactgtaaatcctacaaatactggatcaagaacttttactaacacattgtcaatattatttaagaaaatgaactttacgccatctttctccattttatctaaataacctttatgctctagcgatttaaatatcccaccattaccattaggtgtttccataatatagcctttttcattaaaaatcagtctaccattttcacttagagccacaatgttgtcttgtttaaaaaagtgaatacgttctgggttataaccaaaataatcatggttttcaaagtaacgtaatgtttcctcatgattaatatcactagtcataatataccaattaatacaatgtcctgtttcattttttagatgcaatagttgtcttgcttgaagttcaaataagcttacaccttcaatttcaaaagaacctttaggtcccttataacctaaacgtgtgccttgaccaccagccataagaacaacagcaaattctccatttcttattgcttctattcctttatgttcataatattcacgatcttgttcagtgaatgcttccttaattttataatcaacttcagaaactgcagtaacatctgtaattgttttacgattaacatataaactttgataaagttcttgaataaattctaaatctaatgagttcactttttcatctaattgctctttttcattactactcatcattttctcatattcaattaaatgttcttgattgtatttttctaatttactttgatctagcatttataactctccttatagatagttcgtgtcattcaaatatatttatcatattaattataaatttgatattaagacaagaaagatgatccatcatattcattgatatcatccggacaatgaatggctcacatatttcaaaatttcatttataaactcttgaaatattatgtatattgctccaatactaaaagctgttgataaggatgcatctaaaaaaccaccagttttgaaagtaaaaggaaacttaatcgctaaaggtattggataaagtaactttacccctctaggtgtcaacatatctagtataacatgagaagccattgcaccgataatagtaactaaataataagtcggagtttgaattaaaataagtaaaaaacctatcatacctaagaataacaatgaatgcgtaaatgttcgatgcccaaagatagtactaacgagcaaactaagaattttaaattgtcttccaatcttacttcttgtatgacaaatatctggaagtaaacttcctgctattgctaaacaaattactgttacagtagaaaatagatctgtatgataatggtcaactgttattgctcctacaagcaaaccagcagctacatgcgtttttcctgtcatttatcttctcctttattaaagatatattaacataaatagtcttaaaatacgaacatattttcggtatatagatacctttctttaaacgtttatttttcttatttattacatgtgttttatttgatatatctttgaatttgtatattattaaaataaataagcaaggaggtctgactatgtttgttgttacaaatcgtattactgtaaaaaaaggatttgctgaaaaaatggcaccacgtttcactaaaggtggtaagattgaacaactagacggtttcagaaaaattgaagtttggcaaattgacaatactaatgatgctgaagatatgtatgttaatacatggtgggacaatgaagaaaacttcaaagcttggacccaaagtgatgcgtttaaagaagcacataaaaatactggaaaatcttcaacagaagattcaccagtagtaacaagtgaaattgtaaaagcaaacgtactatcaactttagaatagaaaaagaagcaggaaggaattggaattgcattcatcaatccttaccctgcttcttttttatagtaataaatgtgccattaaagcaataattggtaatgtgattgcagttctaattaaaaatatcataaataactttccgagactgaccggaattttagaacctaaaatcacaccgcccacttcagatagataaattaattgagatatacttaaagcaccaatcacaaatcgtgtcaattcactgtgcaccgtcgctattaagatagaaggtaaaaacatatctgcaaaaccaataagtaaagtttcggatgcttttgcagcttcaggaatttgaagtaattgtaatataggaataaatggctttcctatgatttcaaatactggtgtataatttgctattatcgtagcaatagtccctatactcataactactggtaaaataacaaaccacatatcaatcaccgttttaattcccgttttaaaaaattctttaactcctggtgcttttagccctacaattgtagcttcatcaaaaccgtgagctaatgcagtttttccttctggaagtttttcaagtcgtgtactttcagatacttctttcgtaaaatcatccggaatttgatttagtggccatattcttggcatgatcatcgctgcaactaagcaagaaacaattactgttaaataaaatacaaaaaacttttgttgtaatccaatagtttgagcaataacaatagcaaatgtgatcgatacaacactaaaagttgtagaaattactattgattctctttttgaataaatacctttttcatattgacgacttgtaataagcacgcctactgttccatctcctataaatgaggctaaattatcaactgctgatcgtcctggtaaagtaaataatggtctcatgattggtctaaacaatggtcctaaaaattctaataaaccgtattccattaataaaggtaaaaataaggcagcaaaaagaaatactgctactaatgtaggtaataagtcattaaatactaatccacccgtatcttctgaatagatcactttacttccaattttaaaataagtcatccaggcaaatacaactgcaagtactcttagtatcatccacactgggccaacttgaaatgcattcgcgataagaccacctggttttactttatcctttaaaattgttgaaaataaaatagtcaaaatagtcgataacgtaatgattgtaataatgagaattgacattgcaggtcctaataaatcttttaaccaatttgccaaaaatgccactggtaatgttgtttgtttctccccatcttgtacaattggaatgggtattaaaaataaaataataccaatgattgacatcgatataaattttattcttccttttattttctcctgtttgttataattctccaatattcacccttctttctatttgtataggtaattgtatttattcatttgttttgtattttcatcgaaattaacgcctattaattatataaatataactttatatgtatttttataaacaatatgtactttactatatcttattttcaaataacttgcaatatacaaaagtttaaaatttcacaaaaaatgtgagatcgtattcactgtgaatacgatctcactctttaatatttaaattcttctaagtaacaataaaaagtatggaacaccaacaatggcaataactacgcctactggtatatcaagtggcggatgaatacctcttgctaatccatcactaaataaaatgaggattgctccaattaaaccagacatcattacgacgtgaacatgacgatatccgacgatttttcgagctatgtgtggcgcaatcaatccaagaaaactgattcctccaactattgaaatagatgatcctgctaacatcactgataaaatcaacagtatcattttaatacgttttattcgtgtacctaatgctatcgctattgaatctcctaggtttaagatatcgagttgatgacttaaagcaatgacgattggaatcgtaataataaaccaaggtaaaattgaatatacattttctatcgtatgaccataaagactacctgttaaccatataagcgcattatttgcatccatgggatttcgtattagtaaaaattgtacaattgctgtacatatagcaccaattgctaagccaattaatgccaaggtagatcctttaatattaaattgagatattaaaaaagataaaattaaactgattattaatgcaccaacaaatgaacccataggtaaaatgattaaaggagcattgggaaaaaccataataattataatcgctgctaaacttgcacctttagtcattccaataacatctggagaagcgagaggattttttactaccccttgtatgattgttcctgaaatagctaaactacttcctactattaatcctaaaagtgttctaggtatacgatattcatttagaataaaatcatcttgtatcaataaactatttattactttaacgggattatacattgttgcgccgacgcataagctaataaatatacttatgattaatatcgtaacgacaagtgcataacgaatagctaatgagtggtgtgtcatattcgtttcactctccttaaagtaataaataagaaataaaatgctcctataaatgaagtaacaattccaactggtgattcatagggatatgtaattaaacgactcaatgtatcagataataacaataaatttgcgccaactataaatgttaacggaattaaaatgaagtaattatgcggtgcataacgttttactatatgtggcacgattaatcctataaatccaataggtcctacaatagagacagatgtcccagcaaatataataacaagtaatccgataatgattcttatcacttcagttttttgacctaaacttttggctagtgtatcacctaattccattattgtaagttgtcttgcaaatgcaattagtatgataagtcccataagaatccaaggacaaattatcattacatctttccatttcattccatttaaagagccaactaaccaaaacataacagtagaattagaatcttcattaagtaaaataataccttgtgtaagactactaaaaaacaaatgtactgccattcctgctaaagctaatttcactggtgttatttttttcgtagaaccagataataaatacacagttaacccaccaataaatgccccaataaacgctaaataggttgcatagtttcccatcgtaggcattaatactgtcactaatacgataataaatgaagcacccgcatttaccccaaatatttgcggagatgctaatggatttctagttatagattgcatgagtaaaccagccagagctaaggcacctcccacaagtatggcaacaatcatccttggcattctaacactttgaatgataaacgtctgcttgttttcaattgaagtaaaaaagtaatgatacatatctttagtttgaatatttaaagttccagtggctaaattaagataaacaaaaataacaagaaggcaaacactcactgaaaaggtgagtgtcatacgcttcttgattgatcttttattagcagaaagacgattacttttttgtatagtcattgtcaatccatcctatttatttctatctttttttgagatttctacgatttctttagccatttcttctgaagagattaaaccacgtgcgcgggcccatgtatcacgatcaaccacatctattttatgatttttaactgcatcaagtttgttccaaataggatcttttttcaattcttgataagaaggttcattagaacttgcaccatttgtcataataaacatgcgttctggattgatttcagataatgtttctgaattgagttgtaaataaggtccttgtaaatatttacttaatcctttcgtcacatctttatttaatgcttctttaaaacctaattcacctaataactgtcccacataagattcacttggatgcgctagtaacccagacttagaagctacagctggaagtactttttcatttttatcaaattgaatctcttgtttatattgagctatttttttcttatgttcgtctaaacgttttttaccctgtttctctttattaagagatttagctataactttaaacgctccgatattttcattatagtcgccgtcgaagctttttaattctattgttggagcaattttacttaattccttataaattcctttatgtcgattactgtcagcaataattaaatcaggttttaatttacttatttcttctaaatttggttgtttacgcgtaccaacagatgtataatttccaattttatctcttaacggtttaattattctattctttttattatcgtctgctattcctacaggcttaacatccaaagctactaatgcatcaacaaatgaaaattctaaagctactactctcttagcatctttaggtactttagttgttcctaaatcatgtttaatctcaataatatctttagatgacgaaatttgattagatgaatttgaaccattgttacttacctttccacatgcagttgttaatactaaaatcagtaatattgaaataattccaaaaattgttgttcttttcatgatgacactccttaatatgtattgaggtatatcttcattttattgataacgattatcattgtcaataaaatataaaaataaagattggcacagaatttattttgaattcgttggcccatcacgaaaacgttgactgccaacgccaacgcataaagaaatctgagacactattgatgtctcagattctatataatgcgttatttgttgttgatatattttgattgattcaaattgttaatacgttgagaaatagtatgttcttcactataatatttttccattctctgatgatacattagttgtgatagcgcttcgtattctaatgaaaatggtatgcaatctcctactttatagttaatttcttcttttaaatctatcattaaatgatcacttgaagcacccataatttctattcgatgattgagtggttttattttttcaatcacagtatcaatatatcccacatctacaatagcttgtaagtaactttcttttgtcttcgtatacctaggtttaatttcaataatttccgcttcaagtaatattgcattttgaaataactcgggtatattttgattagtagttgtatccacaccacgaaataatgtttctcctattctcaactcattaatacatcctaaatcatattgttttaataatggaagcatacttgagttacctccagaaataacttcaaatgatactcctgtttcgtattgtacatgatgaacaaattgatttatttcgtcgatatcatttaatgttggagctttagacttaaaacacatgaaattaaatgcaagacctaaaagttttatattattcattcgttttatttcatgaatatattcaactatatcataaggtaatacaccttcacgttgatctttccaatcgaccatcaatataacttgatgttgattactcatttcatttgcaatatgatttaactgatgtattgttgccatttctgtttgaatacttacgtaactctttttaatcaaatcttcatactgatgctttaaaggagatctcaaaagtaaaaattgacaatcttttgtaaattgctgaggaatattttctagtcgagattctgcaaagtagttaaatcctactttcattaatcgtttaatgatatgttcatctccagcaatactttttatcacaggtatcatggctatatttttgctgtcaaacaacatttttaatacatgtgcattatattcaatctttgataaattgattacaatacgagacacttaattcacctctctttttattggattatctaaactaatattcagatattttttcactttctttttcattctcattttcaacaatgcttttactgtaattgtaggtccaaataaaacttttcttaatgtatctgcatgaggcttagtatcattaattgctacttctatttcttcttgaattatattaaaaagttcttcttcttttataaattcatactttttaaaatgaaaaattaattctgctagttgattttgaacgactgcgtgttgaaatttcataatgacttcttcaattgagtctgcaagtaaacttttattttccacttctatatgctttaatctttgacttagggttttaatatctattcgagagccaccgagatctcgcactataaattgtatttgatactttggtcctaaatgcactagtgtattttgcatatgtgcttctaaagctataccataatcttgtattaaagctaataaaggtgttaccagttgacgagtataatttcgcataaactgatgaatggtatgttgattgatgtcatcattaatccatttaaggtaactatctacggtgatttcattatctactacatttttatttactaaagcacctgtaactaataaaataccatcgtcctttgtaaaaggcttttcacgaataatacaagcaagttgtctagcatcgtcactatctgttttagcaaataaaccatagggctcaagtgcaacatctaattgtgtatactgatttaattcacgatgtaatgcttgacttaatttgggtccatcaattgttgtttctggagatactgtcctaactgcactagtagcttgaacattgactggtaatttcacatgataaggatgattaattagcgacattgttctaaaagaagatgttgctttagatggaacatgaaatggagtagatatcaaaatatgattttgtagccactccttaaatttattacgaatagtatgttcatattgccatgggtgaactaaaatgactttatagtctttaagcaaacgttctctattattcatgaatgtatgtaatacatcaagatattcaggaataacctcatttaaaataaactgagaatgatcaagaatggttgtaacatttacatactcattatgtattaacatcactttcaaattaataatcttttcaaattctggcgaataggttctcacttcttccattgataaaggtaattttgttttagtaagtggatgtgtaggatgaccttcaaatattaagctttcagaatatagtacgtcatctatatcattattttttttcaacttttctagccaagtaaaaaaatttaatcgttctgagtcatttatatatttatcatgtctttgaagatactcatgacgtgtatcaaattctttatatacttcaataaaactatctctgctatgaataagttcacttcttaaatggaatgggatatcaatatgaaagtctgttactagtatgtctaataggttttctagactatccactgattctttatgttgatgattcatatatattattggcccatcaaattcatatcgagataatgcactttcgtatttataatgaacgtttagaagcacttgttcaaactcaatcgttatataatgattttctttaaaaatggtagttgaatgagtccatatattttcctttattagagcatttactactctatattgcatatttcgatctgcatgcttccactcgtttaacatttttaaatcctccgccttatcattcgttttcataattaagtttaactagtttaataattataaatttaattaaggttactagcaatgacatgaacttagaatttattaaaatattgtgtcttaaatttaaactatcttttaaaaaggtttaattttagagttagatattatacaaactatttataattttgtagaatgtggatgaggtgttatatgaataaaaatacaaccattaataatcataacttacaacttactaatgaagaatatgatgtttatacatatttaaatgaattttatcctgatttaatcgatcattttaaacaatatattttaataggtagagataaaatttctcaacgtcttattacatctttatatcgtgaaaacttaatacacgctaaagataatagtcagattattagacctaacaaattaaccgtatctatgttttctaaagataaagacgtagtatgtattcattttccaaaatcaaatatcgatatttacagtcaaataaaagggagatatgccttcgaccggatagatgtggaaggtcctttttatatcttaaaacatcataatcatgaatatgaaagaatccaacatccaaatgatattctagatttaattttagctgaagagccaaaacttgataacgctgctagtgaacagtttagagaagatttaaataatagtgctgctaatatgattctggcactaagttatcaagctaaacatatgcattcaaactacgagtccttatgggaattgattgcaaaaagtgacgatagttatttacgttcggaacaatcagttatagaaggtcatccccttcatccaggcgcaaagcttcgtaaagggatgagtgctaaagagaatattcattatagttcagaatacggtcaagaaatccagttaaaatgtgtattcatacataatagtatagcaaatgttcaatccttatcttcaacctataatgatatgcttcaacaatcttttcataaattatttactcaccttttaaataaatataatgatataagaattgaagattatcatttaatggttgtccatccttggcaattcgaacatattttacttagtcaatatcaacaagaactagatgaacaacttattattcctattgatatgaccttaccttattatgctggcttatcattcagaacattaatgccaaaatatcctaaactattcccgcatattaaactttctacaaatgttcatattactggggaaatacggacgctttctgaacaaacaacgcataatggacctttagttactaaaattgtgaatgatattttaaaaaacgaccctgattttcaaccttatcgcatagaaaccttagatgaaattgctggcattcatttttataattctaaagatcattcaacaatccagactgaacgtagtgaacaactaggaacattatttagagaaaatatttatacattaatcgaagaagatacaatacctgtcataccgtctagtcttgttgcttattatccaaacaatactgaaccgccaattgaaagcttaataaaacgatatcaacatacacatcaatttaagacatttgaaaaagcggcttatgcatggattcaagattatgcgactcaattattaggactagttattccactatatgtaaaatatggaatcgcactagaggcacatttacaaaattctattgctacatttaatcaagatggttgtttaagtaaaatctatattcgagatttcgaaggattacgtattgatgaaactcaattaaaccaaatggggtataaaacatcacatttccataagaaatctagaattcttactcaatctactacctctgtttttaataaagtattctattcaactgttcaaaatcatctagctgaattaatattaacaattactgaaaaagtagaaaatataaattttgaaaaaataatgtggcatcatatcagtcatattattcaagatatattagctaagttgactgatgttgatacagaacgtatgcaaaagattactcatactttatttgctgcaacaattgattataaatgtgtaaccactatgcgtttagaagatgaagcacatcattacacttatattaaagttaataatccactacattaaaattaagagacggaataatgatattccgtctcttgttaaaaaatgatattaactataaaaagaccttggaacattccaaggtctttttttcaataagattattgtaaatctgatctttcaaaattattattgttgttattattgttattgttgttattatttttttggtttttttgtgcccattcttttttagtcattacgtcgtcaacttgcatgttaacttcaacaacatctaaaccagtaatgtatttaacttgttctttaactaagtcagttactttacggaagatttttggagctgattcgccatattctaagatgacttttaagtctacagccgcttgtttttcaccaacttcaacagaaacaccttgtgttacgttgttaccgcttgagaatgcactagaaatactgtcagtgaatccgcctttcatatctaagatacctcttacttcacgagcagcgataccagcaattttttcgataacttcatcagagaacgttaatttattttcaaaatgttgttgattattttgacgttcttctctgtattgttgtgcttgttcttgacgttcttctctttctttttcatttactccagtttggttattatacgcttgtttagctttgttattatctacagccatgtgaattctcctttttaaataaaatttaatttttaatacttaattttttaatttatatgaattcttaaataatgaatgttaactccatcgatttaagaagttcatgaaatcttgtgtacggtctttcatatacccaacgccaattccgattaaacataaaacaataattaaaattgttttccagaaccctaaagtcaggaataagattgcaataattaagaatgcaaagaaacctataattcgccatttatacgactttaggaagtcgataatttgttgagtagaatcttgactattttgattattatcagccatgttatccctcccttatagtacgcgttgtccggcagatttttgatctctaacattaatttctaattttctaacaggcatttcagtaaaatgctcaacattatgtttaatgtcagatctaatgctttcagttaatgattttacttgcacatcattaggtactaagaaatcagctttaatatcaatgtaagaattgtttttcttattgtaaagtttagtaaccacgtttggttgtctgatttcatcgtatttagttaatgtatcgtatgcagacttttcgactgctttacgtgatacataaatatgtccatcattataatctttataaagacctggttttctatatgttggtttaaagatgctaaataccaatataataccaattaatacgagtaaagcagataaaccaattaatagtggttggaaccaattgaattgtaagaaatagtcttgataacgcttaatacgactatcatctatgtacataaacaataagaaaccaacaatcgcaactattaataggccaaggataaagtttttaaatctatgcacctctaaacacacctccttagtcattgttgaaattatttaattataaaatttaagtaccctttaaaaattttttaaaacgttaacattaaaattttttatttaatttttttaaatttattaaagtttaccttctagattaaatattcccaaatttaacacaataaaaacctgtttttcataattattttcgtttttttatattattcgtttttttgtattttaaattatcttttttcattaaaacatctttctttgatacccgcggatgatctgaactcaacgttttaaataaagaccatatcataagaataataactacggaaaatgggagtgctgcaataattaataagttctgaattgcttgtgttcctccggtgtaaatcattatcatcgcaaataaggccataataataccccaacttactttaacgaaagagttaggattaatatctcctttactacttaacattccaagtacataagtagccgaatctgcagaagttacaaagaaaatcataacaacgattaaagtaacaatacttaatacaaatcccaatggaaaatgctctaaagtggcaaatgttgcagtttctgctgcttctttagcaatattagcaattccactatgctgaagatacactgctgctcctccgaacactgcaaagaaaaagaaagatacaagagctggagcaaataacactcctaaaataaattctttaattgttctaccacgtgatacacgtgcaatgaatattcctacaaatggtgcccaagacacccaccatgcccagtaaaatatagtccaattttgtacccattgaaattttgcgccaccatccattggaatacgcaaactcatactaaagaaattaaaaatataatttcctaatccgttagtaaatgtatttaaaatatataaagtaggtcctactagaaataatcctattaatacaataaaagctaaaatcatattaatattacttaaagtttttattcccttatcaattccggaccatgcagaccaactaaataaaatagttgcaataataataatgatgacttgtgtgctgaaatgactcggtactttaaacaagtagtgaagaccttcattaatttgtaaagcaccaaaacctaaggtagctgctacacctgtaaccgttgcaataacagctaaaacatctatagcacttccgattggtcctctcattcttttttctccaaaaattggaacaagcgttgcgcttactaaacctggataccctttatgaaaattaaaataagcaaaaactaatgcaacaatgctatacactgcccacgcatgaattccccaatggaagaaagcaaactggaacgcatcattaattgctgcttgtgtaccaattttatgtataggcgttgctttataggcatgactaactggctcagctgtagtccaaaacactaatcctattcccattcctgcactgaacaacatagcaaaccaagaaagtaatgaaaattctggctcttctccttccacacctaacgtaatggatgcatatcttgaaaataataagtatacgcaaataaaaaatataattaaaactagtaaaagataataccaagaaaaattaactgcaataaacgatgtaatattttgcgtgattgcttctaattgcttaggtaatatcgctccatacactacaaataatgtacagatagctaatgcaatccaaaatacaatgcttatagatttttttcgcattatattattctcctttctgatagttagaaattctataccctattcatgttatatctaacgatatattggaatttttataattaatcaaattgatatattataaaataataaaaacgcctcttaatgtcttatttatagacactaagaggtgttaaatcattctctattcttctacatttataacaagttttcctatcatggaattggattctaatatttgatgtgcttcatataaatgttctgctgttaagccattgatgacttttgtcgttgtattttgatacgtaccattctcaatttttttagcaatatcctctaaataataatgatgtttaatcatgtcttctgtttgaaaaataggtcttgtaaacataaattcatgtgtaaaggaaacactttttgtttttaataaatttaaatcttgtgatcctttaaaagctacaatcgtagcaacatgtcctcttggtttcactatatctatcattgtttcataatacatgtctgtatcaaacgtgcaaaatacgaaatctaccgcttcaatgtgctgttgttctaattgagattttaaatcttctttatgattgagtacgatatctgcacccatcttttttgaccaatcgattgtttcttgacgtgacgcagttgtaatgacttttagaccatatgccttagcaatttgagtcgtaatgcttccaacaccacctgcgccattgataataagtaatgttttccctttattttgatttggattctctgaaattttaaacacatcaaataaagtttctgacgctgtaataccagttaacggaagactagcagcttgttctgccgaaagatttttaggtgcttttgcgactaatcgttcatcaataagttgatattcctgatttgaaccatgttgattaggcgcaccagaataaaatacaatatcgccttccttaaacattgtaacctctattccagttttttgaaccgttcctactgcatcaaaacctaaaattctcggagaatttttaacttcagtaaggcgttgttttgtatcaaccggatttacacttatactttgtattttaacaagcaactctctagaagatggctggggcatatctaattcaaatggttcaaatacatttccttcttctaatttaaatggttgtttaaatcctatagctttcataagtatatacctaccttttactgaattttaaattatacattctctgacactttaacgatctgtttgccaaagttttcacctgtaaataagtttctgaacgcttttggtaaatattcaaatccttcttctatagatacttttgttttaatttttccttcttgtatccacgttgccagttctttacttgcatgttcaaagtcatcggaaaattccgctaccaagaaaccacgcatcagtgcttgatgtttaattaatgtgctttgtacacgtggacctttttcttgttcagtattattataattagaaatcgtacagcaaacaggaatacgtgcatgacggttgagatgtttcataacttcatcggctattgtgccacctacattttcaaaataaacatctacgccattcggtacggcttttgctaatgcttctgcaaaatcatcctttttataatcaatgcctgcatcaaaacccaattcttctgttagataattcacttttttatctccaccagctatacctactactgtagcacctttgattttagcaatttgaccaaccacagcacctactgcaccagaagctgctgaaactactacagtgtcgccttcttttggttgaccaatctctaataaaccatgataagctgtttgacctgtcatacctaacgtacttaaatataaataaagtggtacatctgtattagatattttacttattttctcttcatttactgtattaatacgcttccatggcaacatacctacaataatgtcatcttcattaaatttttcagaatttgatttaataattttgcctacaatgtgactttgaataggttcgccaattttaaaaggctccacataagaatcggcttgagtcattcttccacgcatatatggatcgacagatatatataaagattcaatttgaatttcattttctttcggatcaactatgtcaatattttcatatttaaatgtatcatcttggggcatacctttaggatattttgctaataaaacttgctcattattcattataaaagactcctttcagtattcaaaaacagtgtcatatcacaaacaattttatcgcaattcaactgctttcactttataatgtctagtatgataacacttaatactttattataccaagcaaagtgaggtcttaaacttgaaattaagtatcttagactatgtaccactctttgaaggtgatacaccacaagaagctttaaatcattcaattgaacttgctcaactatcagagaaacttggttatgcacgttattgggtagcagaacatcatcaagttccttctgttgtatcaagcgctcctgaaatcgtaatggctatgttacttgaacatacacactctattcatattggaagtggcggtgtgatgctcccccattatagtgcttacaaagttgcagaacaatttaaaattatggaagtcaaacatcctggccgaattgatatgggaattgggcgatctcctagcttcaaaaatgtaaacgaagcgctaaatgaatttaaaactcaaaaacccaaactatctcaacaaatagatgatttgaacaaatactttacgaatgacactattcattcacatcgtttcaaaactttagaagccactccatacacagagcattcacctgagatgtttattttaggaatgagtgaacaaagtgctgaacttgccgcaaaaaaaggcttaccttttgtgattgctcatatgggtcaatcgcacgcaaatttaacacatgtcattcaacattataaatcgcgttttacagagtatcatggtcattcgcattcaccctatattattttagctacttttgtcgttacggcagaaaatgaattaacgattaagcaattagtagatacattaaatttgtggttaatacgtattaattatcttaaacaacctaaagtatatccttctattgaaacagcacagcaacgtcattattctgaaagagatcgagaaaaaatagaaaaaaataaacgtcgaatgattagtggcttaccacatgaagtagctcagcagttaatacaattacaaaacgaattagaagtcgatgaaatcatgattcttcctaatgtatacggacatactcatcgtactaaattaattgaacttatagctcatgcttgtctagataattaggagagtcagtattatgaacgctcctaatttttatttgtttcataaactttaatgtttttatttgcaacatctttattttcatgaagttggctatgttgagtcgttgattctatatattaagaatttttatacgtttttggacttgcttctaacaaagattttaatggccgagacgagctattagatactttaacgtcaaaatgcataccattttaattatcttcataaatgtttaaatcttctatttgtttacctttataaatagtttttaatccaagtcactttttatcatcttcactcattttgtttggtttgccattttgatcaacttgaatttcattcaccttttcatttaaattaagaatgccattatatgttctagcaatattgacttcttttttagtgtcggaaatagcagatgattatcatcatttttcttaaaatacgtgaaagataaatactccatagaatatacgagaaaattatactccttattttttaatactagtatctcaataaaataagaaacaggacagaaatgaaaatttctgtcctgtcaaatttataaaattacttaatttctttagattcagctaatgctttataccaatatgcactttttttcggataacgttcttgtgtgtcaaaatcaacgtagaatagaccataacgtttttcataaccattagaccatgagaacacatccataagtgaccataagaaataaccttttacattggcaccatcacgtatcgcatcagcaatgacttcaagatgttttttaacatagtcgatacgtgcatcatcatcaactgtcttacgttcttcgtcgaattcatctttataaccaagtccgttttcagtaacataaattttgtgatagttaggataatcttttataacacgcataatttgatcataaagaccttgtggataaatcatccaatcccaatcagtacgaggaacatctatgtcaaattcacgttgtcctacacctttaagttgatacttagagccacctttatctccagtagcattgtgtgtaatttctgattctccttcatatcctctcatccaatcactcatatagtaattgatacctaagaagtcatttaaatcttttgcagcatctaatgtagcataatcttcatcggtaatatctaatttaccgccattgacagaaagaatatgttgtacaccttccatagtttcacgagaatattttcctaaatatgttgcatctaagataaatttattatgaataatatcttcaagttctgctgctcttacatctttcggatttgaaggatcatatggatacttagttggtaatgcatgaactactccaatttccccattatatccattatctttaaataatttaactgcttttgcatgtgcgaccatcatattatgatgagattggaatacttttgcaaaatcatatttaattcctggtgggaatttaccgactaaatactggccatcaccaataggaccaatttcattaaaagtagtccaatagttgacttcagtaaattcttcaaagcagaattttgcatagtctacaaaataatcaatcgttttacggtttaagaaatctccatcactgtgaagtgtttttggagtatcaaaatgatgtaatgtaacaaacggttcaacgtgtcgtttatgacactctttaaataaattgtgatagaattctacacctttttgattaacttctccataacctgttggaaaaattcttgaccacgcgatagatatacggataccattaacaccaaatttttcacttaattctaaatcaactggatatttatgataaaagtcacttgcaggttcagctgtataccaatagttttcttctagataagtgtcccaggctacacgaccttttccgtctgtttgagtcgcaccttctgcttgataagctgctgttgcaccaccgaaaataaaatcttctggtaattttttcattatactttcatctcctaattatttttcaaattgttgttgaacgaagtctaatgctgctttgccatcacgagttaagttaatgtattcaacaccttgagtttttgctaatttaatacctaatcgatctgtatcttgttttatatcttcatagttagaagcaacttgaggcgctaaaataattaattgatagtctttcataatatccatatgtgcaccataaccaccagctgccgcttttacaggtacctgatattcttcagcagccttgtttaacgcatttgcaagtaatccacttgtaccgccaccggcacataagactaaaacgttagtttgttcgttaattgaatttgatgactctttagccgatacttcctcatcggaaggtgctggttcagttgttgtcgcttcatttgcaccagcagttgctaaaattgcatctgcttttttcgtatcaaagtttgctgatactttttcttttaattcattatttacttctttattgcctcgttcttcttcaagaatttgttcatcatatacttttaaaaatggataataaatcataacgtcaactacgattaatacaatcgctaacacaaatgaccaaaaagcaaagcctgtacccatcacaataccaagaggccctggtgtcgtccatggtaagaagatgctaaaactattcattttaagtacatcaacaaagaatttaaagatccatacgtttactattggtgcaaaaataaatggtatgaaaaatactggatttaatacgagtggtgcaccaaataaaattggttcatttactccaaagaatgttggtacaaccgatgctctaccaatggctttatttctttttgatttagttaaccacataaacataaatggtacgactaatgtagcaccggtaccccccatagttgcaacgaacatttgtgtaccaggtgtaataattttatctgcatgttctcctgcttgaatcaaatttaagtttgtttcaagatttgcataagtaattgcagcgattgctggttcaacaatagatggaccatgtatacctacaaaccagaagaatgcgaaagcaccgaagataagtgtgacaccaatccagccatctgccgcagtaaataatggttcaaagatttttaatacggcgttcgctacatttgtatgaataaatgttcttgataataaatctaatgcataaataatgataataaccgctgacaacgggaagatatctttaaatacctgggaaatatttggtggtacttctttaggcatttttattgtaatatttcttttaataaagaaattataaacaattacggtaataaaggctgaaataaaggctgttaataatccttttgtgcccataaatgcacttaaaaatccaccctctttaataggatctgctgctaagaataaaaatccactcatcgcagccatcattgtagaaataaagttaatttgattggttttatctaatttcctgttgtaggaatcagttaaagacttagctgttgttccagctacaatcaaaccaacaattcccatggtttagtttgtactttttatatgtatttctaactatttataaacgttgatatatcagtatttcatagttactttatttttatagagtgctattaatttttaaataacgtattcaaaacgtattcaaaataaaaaatgccactttaaaagtgacatttcagatgagatatttaacttgtccgtgtgctaatcatttcacacaattaagtttaattagtttatatattatctattgttggagaagttttcaccaaaatatcatgaacttgatcagcaaaatctaataatgaaataatatattgtttagactccttattaagatgtatataagcataatgttcttctacagttataaaatttttaatactgtcaatattttgttttaatttataaaacttatctgtattaaaatacttgttttcatcactaggaagtatttcatcaaacaatctatattctctactattagcatttataacatcttttaacaaaagcagatttaaataaaaactttcgtctatttctactttagttaaatcatttttaactaacttattatatatatgtaaataaaagtacttagtgtctctatctattgatttcaattctatttttacctttttcagattaaagccaagcggtgcatatacattagatagaaagtcccataggtaattcatattaaacagtaattcactttgaatcgctttaagtttatccactttatctatataattttgtctcttaatattatgtagagcattttctccagatattttagcgcctaagtaagcaccaccgaaagttgtaaataaagctaaaatagaaattattatctttaaaagttccttcccttctaacaagttttgaaaatttaaaaaacatgttaaaaccaacactccaccaatagatcccgttaaaatatttatccagtactttttaataaaaaacattttttacctcactttttatttactatctaaatcaaaattattaagtaatatttctaataaaaaaacaccacttattaagtgatgctttaaaaaataaacggttatcattcttcttcatgattataaaaattagaattataatctaacatttcttttgtaggactaaatacatacttaaatataaccgttataatcgtaaacaaatttgcaaaagtaaccgttgttaatactattattactttatcgctcaaatgtgctggattccaatatagtaaaatgattaaattagcaataataattaaacttatacacaagaatatgcttattgaccaatttttagctactctcttaaattctaattctttagcaatatgattattaaccatttctttatgactagtgatatcttgtcttttatcccctaaaggctgcttttgatttttactgatctgacgttttatatgattattcgatatatatcgagattggtttttatctttattttgtttttctttatttattagttcatttaacctatatgctaaatctttttgagaatttttctgttcttccttttcattattcatattcaaattctccacgttttatttttataagttgagttttagcaaaagctgaactaactttaaacgcaactgcaaccctttgtttcatattttccaaatctattggattattcaaaatttcaatatttccaatcgcattaataatcaattcatgtggtaacaataactcggctgcaaattcatttgcttgtatttctttcaaatcattattaaaagtactgtaattagcttttctaaataaaacttcatatttgtcttttttaagatttgtaccttcttcttttttaagtagccaattccaatgcataactatatgaccgaattcatgtgccattgtaaatctttgtctctgttcgctatcattaacatttaacacgatttctggtttaccttcatcattcactaaggaataaccactgatttcatgaggtttatcaaaaccttccatgttactataaaagactttaacatcaaactgttctataaagtcttctaaattatttatgacgtcataaatatcatagtcattagcaatttctctaatgatgtcaacgaaatctattgccaatttttttgattttcttactaattcattcattggacgtctctcctttctatatataaacaacttatttaaaattaaagtaatttatatttcaatattgcaagtatggttcatattaaatataatctattatttttaacttataaagaaaaatctattaaatttaacgaatatttttgtaaaatatgtattaatttgttaaataattataaatccgtaccataacatattcttataaatataatttcactgtacacagtagatatgacaattattgtcattattaactaaaaccacattgttaaatcgacaagttggttaaaaataactattatttcaaataaaaaaagctagctcattgctagcctatatgtaatgtttattatttatctttgttattttctgctaattttttagcataatcatctaaaattccagtgtatatcttatcggttttataataatctttctttatattatcttcttgatttaatctatgtatttcttccataacttttttaaattcttctaattctttctttttaaactcttctttatcaccttctgctttattgtattcccagtgatgtttaagtaagaatttagtatataacctaatttcttcacttttattaatattcattttaatttcgtcatcatcattgtctaatttgtcctcagttccaactcctttgaagatgtcattaagtatttcatttaagcgtttatatatatagtttgatatttcatcgaattttggttgatctgatttttcaatttcgactttgcttttaggcaaaaatctaagtgaagctagaattctaaatatatcttctaattctattattggtttagcagcaatgatcattaattcttttcgccattctgatttttggtctaaactatttaataattcttggttttttaattcttgattttttaataattctctattttttaaattttgattgcttttaatcgtttcactcacaccaactactgcaataagagctgctattagtgcaaacaatccttctatataattacctagaacttcaagctgcaaagcaaagcctgcaagtataattactgaaaatgcaattaaaagcactataaatacaattgccaaaaatttatctttagcattattcataattagtatttctccctataaatataattgaaactaatataattatatatacatttctcgtaattttcattaataatttaatagctatattcccaatcaaaacttcaatcttttttaaactatgttggtaaatcgataagctagttgatatattatctttctttattcgctgcacgattaatcttcatcttctttatcagaagaaaataaatttattaaaaagacaatacaccctattataaaacctaaaataatcaatccatttaatgacttattatcaaagatattaattattcctagattacctaaatatttccaaaatctattgtaaccaatattcagatctaaaatgtttaaaacaatagcaattgctatagcaattataaatatagttaatccttctttaatgccttcaattacttttttactcattttgataatttcccttagcctttttatttgtatataactgttgctgatatgtataaccaattggaagaggtttttatttcaattacttctatatcttttctattcgtgaactcattaactttttcatctaaagttttagtattaaaagtagcaaatgtttttattttaatatttttattattcattttttactaactccttttcatttatttaatactattttatataaatctgatgatttttataaccttatttatgagttctttctactatgttaaattgttttttacttttaacgtaaataatatgacttgttcgttaaaagatgcagtcccagtttagagctacatcttctttgtatcgaagcggttgctatattcacttacctaacgtcgcaagttgcgacacatggggtagcatttcacgacctcatgaataaggggggaacgtttcgttcagtccttacttagatcaactaataaagggcgtcgtgtttccctacttccttttatacctgactgaacgaattgttcatgcagctaccgtcacgaatggttacgttagtataatacaaacgtaattgtattaattgaagcggctgtatgttaatataagttatagacaacatttctttcattgaacttagtcttactagtcatgtactagtgagacttttttcgcatacaaaaaggggctttacgcccctaaagaattatactatttatgaaagcttttaaaatgtcgagattgcctaagcatacagtatttttattggagaagaaatacttaacggaaaggaaagagtcgccagttagacaatctcaattatcattattacacactaatttttatttagccacactattataataaaaatcattagtttgtatgtaataaagtaataaaaacgtttcactccttacttttcatctacactctcacttagtccgtcataagctaagttgagagtgcttttttatacaaaaaagtgactaaccaattaaggttagccacattgtagtcgaggtagagtaaaaactctatatgtacgtaaagaaattagagattattaaatctcttttgctattatctcattatttatatatttgtctacaataaaataaaaagctatgcccaatggacatagccaagaaaaaatgactcacatatagaaaaatataatatagaagtgcttcataagggaacaacttctaatttcattatacgcattaaatttattcattgtctacaacttttacagtatctataaaatatttacaattctcgttcccaatatttagggaatgaaacttactactagatcattatattgctgcgtactcaatttaggtacgtagataatctatataaggcgccatttaattaagaaaaagctacgttgccattttgactacgcagagaagtcacaaacgatttttcaaaattagaaaaccgacatttcggttttctaatgcactaacttagtgcgtcagctattgaattgattaataagcttatatttaaatctctgatacgataacttaacgtatcagcattctaaggtgtcactaatatggggtatcctttttctcgtgttaaaccacttccctattttaaggtactgattacaggtggacttttaagtctttttgtaactttatgaaatgtaaagttttgacaagttataaacaaaaagactgcacccaaaggatacagtcattttaaaggatactcgattttgagtagtaaattttagtagctacggttattatcttataaaagactctaaatgtaaatagaaaacgcttactttttataacttaaaattaatactactcaaatatgtatatctctcttacttctttttcttaagagatttaaagactagagctaaaattaagaatattaaagcaacagtgagaactgaccccatttatattccctcctagatatctttaaatttgatattaacaaactaattccttaattaaaactaaatatacaaaatgcttacttaaacgttatacatagcctataagcgttgctaaacgcctgattatagcgtcacgtttacgcaacatacttgttttacttataccgaagtagtcggctatatcttgccactcataacagccaatcggacactcccaatatctaaaacgcataatttctttagtttctttgtccgcttcatctatgagttgatctacaccattaacaatattacataatctctcatatttatttttcatacctatgttgtttgtttcactattaatattatttagtaattcaaagtgagtaaacttcatttctttgcgatattgctctatacgttctatataggcctctaatttcttaatatcgtgtctttcaatcgttagcaaagtaatacacctctaaatttcaagttttttaaagtttttttagtacctagtactaattatagaatatataagctaattaatctttgtattgagtaagtaaatgtaaggttttaacatatagaagcgatttatctcttataagcttcagagagcattttagaaagcctataatagtggtactaacacttttatacctaacatatgttaagtggtttaaataggcttaaaaaacattgctatcttacgaaaacttacgtttatttctctgtaacctttatataaccttattattttttactaccttcccaaaaacttcctattttctgactaccttacgaaaaccttccgattttttgacaacataaatttttgtacctatctaaaatcgcactattttttacttaccttgcacaaaccttgtacattttatatttgctctacctttggtaaacctttggatttttgcaaagtccaaatttggacgctgctaattatttcatatgtattataggataacccaaaattgggtagtcctaatttttatagaaatcaattttactatctacttactcaaaactctactacctctaccttttctcatcactttataccccctttactctttaaaattcttcatcatatttcatcatttagcacccacttattcaaagcaacttaacaatatttaacattcaatgtatgcttaactacctaagaaaacctaatatgaaatgcagtaatatatagtattttagttgattttaattattaaacttaataatcattttctacacttagagactcatagtttctatatagttttaaatctctcgaaaattaaagttaattaaaggtataaagtcaaaaatgactatgttcttttttaacccgtcgttaatgtcgttcctttgcttaattactctctttttctcgatgttaatttttaaattttaaaatttgctatatacattgatataactcacgttaaagacaattaaaccccttcaaaaatttgcattatttagcattaattaaaagtacatgtccaaaaatgatcgtatacttttatactgttagacactattgaaatacccaacatttccccacatttttaaaatcttattgatattttcactacaaaaaaagtgaacaagcgatataacgaaataacaataataggcggggggtatttgaacgcccctgtttgaatttatccaacattttccaacaatttcatattggattacactcatatttgataccccacccccctcacgcgtgaaaaaaataataaatttggagagtagacacccctcgccgttctccaataacacttttactctttaaatgtttagagtggggggtattaacttgcttcatttacaatcttatctagcaaaccgttatacatttgtctaatgcgttctcccgaaagattaaatacctttcctacttcgtttaacgacttaccctgacacaataaataaaatacaaagtactctttatctgttcccactctatctacaatttgctctagttcattaaaaaagatttgattgtcgatattatcattgacttctaccgcttcgacatcatcattaatttcaaagaagttatctatatctaactcactctctttaacatcaatcgtagtcgtattatgatactcttttacaaatcgcttaatcgcttctctatcatacttcacactttaacacctactttatgtgaatgaatggctttatataaatcacatcttaaacggttaatcagttcactatctactgctgcaccattagaacgaatgtaatacattatttctttttgttcacttggtgtatatcctttaaccacttctttaaataatgctagtttcctagttgatcgcttaatatatgcgtttagcttagccttttcttctagtatatgtataacaagtttctctaatggatataataccgatacaaacccaaatacatcactagaagatgaatgagagatatttaagtaatacattgcttctatttgcaatttgataccttttatctttgaatttataaactgcggactaaattccgttaatagtgcatattctgttatctttgcttcacggtaatataaacaatgtttcactcgtttaatattcattcatacactcctattcattatcatttaatacatctaagtaacgctgtttaactgaacgtacaccaatatagcccgcttcatctttagttgctggtatccccaaataatacattttaagcgtgtttaacgtgtttctttcactcactaaccttttatactcaatttcatctgaataaggatatagcaccttttctttaagtttctcgaaatcttttgctatatgtttcttctctaagtcattgaagcggttatttattaagttctcgtataggtatatctcatatattttagtgtcagttggtgctaagtgttttataagagcaatcgcttcatcattagttattagtgatagtcttgcttgtaaatcttgtcgcttaataatttcagcatgtggattgtctacatctcgctctagcgcttcattttgcataatacataattgctcgttaatgctttgtaatttacttactgcaaattccttaaatccgttctctaatttctcgattttagataactgttgtttgtctatctcattattgctatatcccgcttctctaagtgctttagtttcatcaagaaagctatctaactctttaatgagcgtttgatagtcgttatcttcaaataatacattccatgcgtcaatgattgctttgttttctttttctaatactttcatatctctttaaccctcttttcaattaaagatgttctaaaatcaattctaagcactgtaatagcttattttagaagccttatattctcatactattacttatatcaatttttaattaacgctctaaaataggctttaaaatgattagttctattttagatttttagtttctagaatttggttataaaaatgttatcaagcgattatttaaatcttactaactatacgggatatttcagcccctccctaaatgcgaaaagaagtcacggacataatagcccgtaactttatttatgaatgaaagtcttttaaccgataatctgcaccgtgcattttaataatctttgtattcttcattagtcggctaaatatcttcttactatctttagttaacgttaattctcttgctgtattgttagtcgtaataatattgtgttttccagttcgtaagttagctacattaaacatcttacttaatccataattggttaatgatgtaccgtaatcatctatcacaagtaaatctacgtctttaataagctgatctaattgtttctctgtcacgtctgatgtttttgtataggtatctctatatgctgtaatgagttccgttatatcaataaataaagctgtataaccttttttcttcacttcttttacaatagacattgctaaatgacttttaccaattccatatgttccatgaagtaataaagaagttggtttatctattgagaagtttgcagcatacttctgcataatttgtttagcttctagtaagtcagagttagtaggtttgtaattatcgaaatgagcctttaataagtcatcattaagcatggattgtttaaatactctttcaatatctaaccgcttctgctttgctttataattacttgtactttgtttggctttctcaatcatgaagcaatcacaccctatacgttcctcttgtccgttatcaaacttatagtaatcgtatctattgccacatctactacatttaaggtcaagttgcatatcaatcactttattgtgtaacttcttcattaaatcaatttcagtaatacttttcatgcaatcactccttaaaataattcgctgtattgtgagttttcttcttcatcatctgctaaacgatctaaaaatgatttattattattcaatttatttctttgcttcttacgtgcttctatatcttcaactgaattaatgccctcttgataccaactaaccaaaatactattcacatacgcccacttataaacgttattgttaatcgcttcttttaatgcttcgataactatatcgtcattaccgttgaaatcttctctccatgcgtctatcttttctacgattgtagaattaagacggccaaatccattattttcataaaaagtaaagacattatccgcttcatgtattgtttggcttttattttcgttagtgtttaactctttttccattgctgcaaatacttcatcagttttattatgtttcttattgttaggtgtcactttagctagtgctttctctttagtatctacatcatcagctatccagtttttaattactgctataaagtagttaagccctttattattttccttacagtagttagtagctacctttactacatctagcgtattatctttaatatcttgtatgaggttgcttacttctttttgtttattagtgttttgcatttcaacaaaattattcaaaagaaagtcgtaagatgttgttgtgtcgtaactactactactgtttttcttctccctgttattcttataattgtttttcttaatactgttattcttagtaccttcattttgtacgcctacattttgtatgcctaacttttgtacgcctacgttttgtatccctacaaattgacgtgatacgaaatgatgattaattgtataaatatttttactaaatccattatctgttctatttctttttatagaaataataccgttatttattaattcatctttatactttctaaaacgattttcacttatatttaattcatgacatataagacttacactagggaaagctatgtcattactaccagcataagatgataaatagctgtaaattgctttagcttcaatacttagattatttttcttcataacttccttataaacatttccatatccacctgtaatatcaactaatctatcactcatagttaccgccctcactttcatataacactggtgctatctgtctttgtaatacgttatctatatacttatatgtgatctttaagtaacctagttttcttaaatggttaattctgtttaatatcgttaattcattatgaccgtacaagctagcgaaatactcatcgctagcagtacaatagccatattcattactaaatgctgttatttctgcaaatattactctctcgctatcattaagacgattgtcatatcttacgtttgcaggtaaaatagagtagtaattaggttgtttatttgattgttttatatcactcatagtgttatcctttcagttagatttttagtttgtttcaaaactatttatcagcgttttctatttcgctttggtcggtggagatagaagacgcttttaatttatctaaagcattattatgatgagttgctatttctttttgcataaaatctatatcttttaaaattgagttaagcactgccattactacatagtcattttgatagtattctttaacgcaatatacttccatatgctttccgtctgctcttaaactatctatataattttctttagattccatatgttcgccaatcattgttattacggtgtttatttttgtttttaaatctgcgtcaataacttctgttttcatttcatcaatataaaaatttaattctctcattttatctactcctatttattaaattgaataattttattttttgtacctaattgaatattaatcccgtgaaatctacaaacattttttagtttcttagacttttgtttaaaaatttccatttctttataaaaaatatctcttttcattttcatttctaataaaacatcatctctcaatatatttattagtgctttagcaccttcataatctttttcttccatgtatgtttcaattttcacatcaagcgtgccacttaattcattaagcatttccacttctcccataatctgagatactttcatagctgctgacatcatttcatcaatagattttaaaatttcattaatcatttataaatcctcctattgcttcatatcgaagcggtttattattttgatacatttctacttaaattcttctactgttttgtaaatgttctctatatgctttataaagatacgagcgttgttcatctcgaatatcaaatttgataatagctaccatgcttgagaataagaaaaataccaacgcataatgtaattcagaatacatatttaaaaatatggttattacacagatataaattagttcattcaaaaacctaagcattttatcactccgcttcttcttgtttgttgtatttaccgtaaatcgtttcactcactttaatatctaaaccaaaacgattttttgcagccattagatcaactacatcagttaatattgtttgtcgagttgctaacatttcaggtgtcattgcaccttttttaatcatcttcttaaagccatatagcgttgatgttgctttatctgatattgtgtttgctttaatataatctactcgcttagctgtttgatttgcttctttcagcttattcatagcgtctttttgtatttgcttgtcagtcatacgaaaagcttcataatcttttaagcccgttgcttgtcttaactcaactaacacatcacatatccagtcttgaaagtcctccgcttcctttttgtttgaacgcatgattagtctataaatgcctttttcgttaatgaccgtatagtcttgatactttctagcgtatttctttttagaggtggtactcactttatgagtagcacatacatgattaggtaatattctcactgcattaaaagaatctctaaaccctaatacacttgttatgtcactcgctactgcccaatgttccccgtctttttctataaatctaatttccataccgttaaaaatttgttttatcatttaaaacctccgaaattaattaatactactactttcattcactcgcttgcgggcaagatttcattaatatttttgactttctaaaaatctttcaatttcttgacgatcatagtaatagcttctcccctgtttacgtttagtaagtcctaaacgttcccactctgtaacgtcactatgcgtacatcggtatagctttcttacttctgtttgtgtaagccaccgcttctgttgttgctctaacttctgctgtgcaatttgctcggctagttttaatatgccgttagctaactcaattgaagcttgttcacttaatattggtgtactcatttagaagcctccttaatttagttactgattaaccagttcataactttttgatatgttcttttgtttatctttgatttcttttcgttctcaattaaagataaagatttagaggaaatacctatttcgttagaagctttcgctaaagtcatattcttttctgctcttaaagttcgtacttttttagaaaaattaatatcaatatcaaacatttctacacctcactcacgttatgtgaatattatataattctcattttgtgagtgtcaatactaaatttctcattttgtgaattttatatagaaatattactgaattatagttataatcattttagaaaggagaatatgtatggataatagaatagccgaacttagaaaagaaaaaggaatgacgctaaagaaattagctgaagaattgaatataagagataatactctaagtcaatatgaaaccggaaaaagaagcccacaacttggtttgttacaagaaatagctaattattttaatgtttcaattgaatatctaacaaaatatagcgataagagagactatccaataaataacaatagtgaggctatagaaattttaaaacggttaaaagatgaaaaagaatttacatacatgaatttatctcttaaaacttctatagaattaaaagcgtggtgtatagcaaataaggaattattggaaaataaatatcctgaattattaacaactgtttcaaattttaaagaaaatgtcacaatggaagatgaaatgataaaaatttattcagcgaaaagatttaatttaaatagttatatgaatgatattaatagtttactacttgatgacgattataacggtgctggtgcataccatgtacttaaatttatgaaagaaactgaacgcattggttctaaacaaactaaagaattgatgaagtatattaaaactctccctacagaagaaagtgaaatcgataaataattctctctttgcttacgagtaataaaattaatactattatcacgccacgaggtagccattccttacggcgtgtcaatccaatcaaacgcatgcgggcaagtagaaaggattgatttacaatgattaagaaatataaaaagaaagacggctcaacggcgtatatgtttgttgcatatctcggtgttgatccaattactcgtaagcagaagcggacaacaagacgtggctttaaaactgagagagaggccaaaattgcagaggctaagctgcaaacagaagtacaagctaatggcttcttaaacactgaaataatgacgtttaagcaaatatatgaactatggttagaacaatatagaaatacagtaaaagaaagtacctatcagcaagcaatgacaacgtttaaaatgatgatacttccacactttaaggatatgactattaaagatattaccgtgccacattgtcaaaaagtagtgaatgaatggtatcaaacatattcagaaacaaaaaaggggcgtatatatgcgtctactatctttgaatatgctattagtttaaaaatcataactgataatccatttaatcacataaaagcaccacgtaagaaaagtaatcagaaacatgaaacaatgaaatattatacaagtgatgaattgcagcagtttttagagcttgtaaaagataatgtattacatcatgctttatttcgtacacttgcctttacaggtatcagacggggcgaattaatggctttaacatggaatgatatagattttactaatcagacgttaagcgtgaataagacgcttgcagagggcttaaatcataggcagtttatagatacgcctaaaactcgttcatcaattagaacgatcagcgttgatagtaaaacattagaggtattaaaagagtggcgtactcaacaacgtgtgttatctcttaaacacggtcataatacatctagcaaacatcaagaaatattcacgaatgtagaaacgaataaacgactaaatagagtatatgctaatgaaactttgaatttgatatgtaagaagaataattttaaaaggataacagtacatggttttagacatacgcactgttcattattatttgaagcgggcttatctgttcaagaggtacaagatagattaggtcacggggatatacaaacgacaatgggaatatatgcacacgttacagaaaagcagcgtgagaaagtggccgaaaagttcgcaaattatgttagtttttaataataacgtattcaaaacgtattcaattcatatcatcaagagttgtaaaccgcttcataccaacgtttacggctcttttttagctcaaaccaacaatacccatggtatagttatatggtttcatcaatataccttccatcgttttactccaagtaaagccaaacacgttaggtacatatgtgattaaaataaatatacttgagaacaagataattggaattgctgcaataaatccatcacgaatcgctcttaaataaatattacgggatattttttcaaagaacggctttcctttttctatccatgctattaacttattcataggggtcagctcccttttttgtataattcaattaaatgcttcattaaatcttttaataataacgttgtcattaaatggtcttgtccgtgaatcattgtaatactaaatgcaatgtcatcaccttgcgcttcttgagctaataagtttgtttgagctttatgtgcatttgcaatacattcatttgcttcctcggtaagttgttcagctttttcaaaatcaccttcattagcagcgtttaaagcctctaataattttgaacgtgcatctcctgcatatgcgacaatttcaaaaccaagtaattgtacttcttctctgttcatatgaataacctcccctaagttattttgctttccaagatgttgcagttgtttttagtactttatttaaatcatcaatgtttttatatccagttgtacgtaaccattctcttgcggcttgttctccttgttcaatataaactttaactgcaccagaccatgtcgcacgtccgcataacacaccattgaaatgtgcacctgcatcatgtgcaaatgttaatgtttcttggaataattcagctgatacaccagcacttaaataaatataaggtaaatgtgtcgctgcatcttgatcacggaaatgttgtgctgcttcttcttttgtgtatacaacttcaccctctgtaaatccttcgacaaaattcatatttacgggtacttcaactttaagcacatcaacattgaatcgctcttctgagaataacttcattgcttcatttactttacgaggttttacttttgcaaattcagcacttttattatctggaatattatcatcataagttaacacttctaagaaaaatggaatgtcttcagcaacacattctgaaccaattcgttcaatataagctttcttttgaatgttaatctcttctgaatcatctacatcataataaagtaagaatttaactgcattggcaccctgttcttttaaacgtttagcagaccattctactaagcaatctggtaaacgaccttttgcattcacgtcatatccagttttttcatatgcaagtaataaaccacactctttattacgtgcatcagaagcaggtaagccatattcaggatctaaaagaatagaagatgcatattgtgttaactcttctgatacaagtacttttaattgttcgatttgttcaactgtaggaggttctgtttgatgttcagccatcattctttttaatgccccacgttgatcaaatgctaaagctgaaataatcccatcttgattacttaattgttcgattgatgctagtttttgttgtgattttgtcatgaattacacctctataacttcaatttgtttgaatagttctttaaatttatctacattgatatgacctgtttgatgctccattgcatttaacattccaaatgcattcgcttttttcagtaaatcttcatcggattgttgatgaacaagacctgatgcaatacctgccactgtagaatcaccagaccctacaggattaacgacttctatttttgggatatttactttataaaatgtttgatgatgtttagcgaaagcgccatcgccacctaaagaaacaataatccattcaatacctttgaagatgggttgagtaaccgcttcttttaaactatcgatatctgtagtgacagtagtgtgtaataattgagataattcatcaatattaggttttatcactgaaggcttactttcgctcaacaatacatccattaatgattgaccagaactatctaaaatcgtgagtagcccttgttcatttgctaatttcacaatatcagcgtagtaattggtattaagacctttaggtaaacttccagacatcgctataacattggcttttttaaatagttctaaaagatgtgctttatagctgtctgcttctctcttgtcaatagttggtccttgttcgagtatttcagtttgttgtccttcatgtagaatagcgatacaatttcgcgtttctccttttattttgaagaaagactgttcaatttgagcatccattaattgttcttcaataaattgacctaatgcgccacctaaaaagccacttgctaacacattttcgccaaattctgataatacacgtgttacatttaatccttttcctccagcagttttactcgtctttttaactctattcacagtatctagatgaaactgttctaatgggtaagagatatcaactgaaggatttaaagttaatgttagaatcatttcacatcttccttaatcgtgatattcacctttgtcccatttttctaagaattcatcaaagaagtgaggattagcttgattatcgttatgtgcttctaaatgattaattttagcaattaattttttattttcttcagtaggtttgtattccgctttaataaatgcatcaacgatatcgaaaataaataattcacctgctactttaccgccgaaactaacaacattagcattcaattcttcttttgaataaagtgctgatgtcatatcacgtactaatgctgttcttacacctgggactttgtttgctgcattactaataccaacgccagtaccacaaatacatacgcctaaatctgcttctccactagcaactttttctcctacttttttaccgaagataggataatgtgtacgtgtaaaatcatacgtacctacatcaataacttcgtgtccttgagcttttaagtgttgtgaaacttccatttttgtatcagttacaatgtgatcgcaacctatagcaattttcattatttattcctccaattagcacattttatttaacatatctacacggatttggtgacgtccgccatcatagtgtccatttacaaattctttagcaatatttttagctaatgtatcgcctacaatttcagcacccattgtaatcatgcgtgcattgttgtgactacgtgtcatatatgctgaacgttcatctgatacttcagcagcaatcattccttttacttttgtagcaacaataaaactacctgcaccataagcatccactgcaattcctaaattatcatcgttcttttgtacttcgtgtacaactgctaatgttgaatcaacaaagtctaattcttttccttctgttacatctactacatcatggttattttcttttaaaaatgtttttacaacatctttaagacgttgaccagcgacatctgaaccaataaaaattgtcataatgattctcctttgaaaataagataattaaacacatgtgtttgaaaaagcgctttcaaatctttacacctaaattataaacataaataaacaaataatcaacaataaatgttcgaatattgtttggaatttcatttttttaaacaaaatattttgtttttatgtttaattgcgttcaattatctaaaaaaaataccaagattgtttatttaaacaatcttggtatcattcaattaatatatcacttctgtgtaagcttttaatttttgtacattatcttcatcatttttatcaacaactactgctgttaaatcttctaaatgacataattgagtaaaatcttcttttccaatttttgaagtatcaattaataagtatttttcaagtgaacgatgaagtgcaagttgttgtgtatacgcttcgtcaattgtagaagtgagtacatctgcatcttttattccattacaactaaaaaacattttactaaatcgttttgttttaagaagcgtatttgtcatttcacctacaaatgattcagtaagttctctcatttctccacctaataagtaaactttaaaatttagcgaacgctttttaaataatatttgaaatactggaaaacaattcgtaatcactgttaatgactctcgttctattaattgagctagtaactcgattgttgttccaggtcctaaaaaaatcgtatcattttcttcaattaagttaacagctttccttgcgacagcacgtttttcttcaatattctctgtgtgcttttcttgatgagacttttctttaatttgaaaagttgaattactacgtgcaccaccatgtattttagttagtaatcctttttcttctagttcagctaaatcacgacgcactgtcatgtcagacacattaagttcctcaacgatttcatttgtcctaaccgttcctttttgatttacgagtttagtaatttcttctaaacgatcgtatttattcattcaaattctcacatccaacttattttattaaacatgtccatataaaatgaacacatatatctcataaagattttaaacgcaatttcattctatactattacttgttttaaaactagaaaataaaggtaaaaatatgttgtaataatagtataaaattcattttaaaaaagttatattagtcattattataaacgaggtgctcagattgagtaataaaattgaaaaattaaaagaaattgttgataaatcaaacaaaattgtattttttactggtgcgggtgtatcagttgcaagtggtatacctgatttccgctccatgggtggattatttgatgaaatttcaaaagagggttattcacctgaatatttattaagtattgatcatttaaatgataataaagaaagctttatcgacttttatcataaacgactactagtagcagataaaaaacctaatatcgtccatgaatggattgcagagttagaaaaagaaggcaaatctttaggtgtgattacccaaaatatcgatgggttacatgaagatgctggaagtgaacatattgatgaaattcatggtacactgaatcgcttttattgcatcaattgtggaaaagaatatacgaaatcatatgttatagaacacaaattaagatattgtgagaactgcggtgatgtcattcgccctgatatcgtattatacggtgaaatgctcgatcagcctactgtctttagagcattagataaaatccaaaaagcagatactgtcattgtgttaggttcatccttagttgtacaacctgctgctggctttatttctaactttacaggagacaatcttgtaattattaatagagacgctacaccatatgatagacaagcaagtttagttattcataatgacatgacagaagtggttgaagaagttatgaaaaataaatagatatacatgtggctagtgttttttagaacgactagcctttttatataaaaaagcacttctcaactttgagaagtgctttaaacattttaattgaacacaaattgctgacgcaatttgcatattgaacttgtaagcaaacaagtttgcaacaattccaatattaacgttttgagaattgtggagaacgacgtgcttttttaagacctggttttttacgttctttcatacgtgggtcacgagttaataaacctgcgcgttttaaagaacctctgtattctggatcagcttctaataatgcacgagcgataccatgacggatagcttgagcttgtccagtgaaaccaccaccgtatacgttaactaatacatcatagttacctttagtttctgtaacatcgaatggttggtttaagtctaagattaatgattcgaatggtaagtattcgcgtacgtcacgatcgttaacagtgatattaccttcacctggtactaaacgtacacgtgctactgagtttttacgacggcctgtgcctctatattcaacttgtgccaatgtaatttcctccttctaattaaccacgtaattcgtagttttctggttgttgtgcagcgtgtgggtgttcagcgccactgtatacaaataattttttaccttgtttttcacctaaacgtgaacttggtaacattcctttgatagaagtttcaagtaaacgagcagggttgttacgttttaattcaccagcagtcactgatttaataccacctgggtgatttgagtgacggtagtaaactttatcttgttcttttttaccagttaattcgattttttcagcgttgatgatgattacatagtcaccagtatcaacgtgtggtgtataagttactttatttttaccgcgtaagatagatgctacttctgatgataaacgacctaatgtttggccttcagcatcgataacataccatttgcgctcaatgtttgattcatttgccataaatgtttgacgcataataattatcctcctaaaaataaatgcttcgtcttagattacaggtactcatcgcagtcgaacctacgaacgaggcctgcaatctaggtcattctgttacgatttcaaagcgtaatgttcatttattttattcctgtctattctgcttatatatcttgtaacacaataagtttccggggcttatcgtgggatgatataaaacaataccgttaactatcttatattttataagcccatttgtcaatgcatattagtcattttgtaatgattttttgtaatgtatttttacatcctcaccaaagtcatttttaagtgcttctggatctaaatatatcttttcaagatataatccttcagcgggtgctgtaaaaggcacattatctctatttttagctttaagcagttcaggaacttcgttaggttgtcgcttccctttacctacttctattaaaaaagctacaaggacacgcaccatattatataagaaaccagaacctgtgacgatatagtcaaaaccttcgtccgtttttacaacttcactttggtatagtgtacgttctttactttcaacttcagtcttttgtgaacaaaatccagtaaaatcatgagttccaataaagtgtttagccgcttcattcatcttaactaaatctaagtcatcttttataaatgtcttaagaccactttcaaatggattgcgatgttccgcttgatacactttatagcgatatctcttacctacacaatcataacgacaatgaaacgtgtcatctacttgttttacactattcacgtaaatatcctcaggtaacgcactattcatcgcatatttccattgtttaggctcaatattcaattctgtgtcaaaatgaaaatactgttcataagcatgcacaccacgatctgtgcgacttgatggatgtatacgcacatgtcggcgatgcatacgttttaaaattttttcaaattgttgttgaacagttctaccttgttgttgaatttgaaaaccaagaaatccatgtccttgatacgcaatatttactagtatgcgcaatgtcttacactcccatatattttaatataaataatatcattccaataggtatcagactgaatagactcaaagtatctctcttatgccatgacaacttacgataacttgtacgttttacattagcatcatatcctctaacttccattgcaatggctaattcatcagctctttgaaaggcagaaataaatagcggtatcattaatgggatgaaagctttaattcttgtcattaaactccccgaactgatttcagaacctcttgatttttgagcaagaataattttatctaattcatccatcaatgttggaataaaccttaaagcaattgacataatcatacttaattgatgcacaggaattttaaatagtttcaatggggccattaacttttcaaaagcatcagtcaagtcaattggacttgttgataatgtcataattgttgcaaccataacaatcgttattaatcttaaagaaataaaaataccttctaatacccctgtactatcaattttaataaaacctatttctaatagcgtagtcccgccgtgagtaaagaaaatgtgcattaaaaacgtaaagattaagaagaaaaatatcggtgttaatcctttaattaaaaaccaaaattgaattttagccattttcataaaacatagaattaataatattacccaagcgaatgtagcaaaagaatgagcaaaaaagataaaaataataaatacaaatacaaaaatcaactttgctctaggatcaagacgatgtatcacagagttattaggtaaataacgtcctataataagtttatttttcatgttcttgccactcctgatacaatgttacaaactcatcttcatttaaggcaatatcattaaacatggtttgatatttatcttcaacatcatattgcagttgtactacatcaggcaatgcaatatgccaatctttcagtttttcgtgttgtctgaataatgatttaggagagcactgttctattactttcccttgtctcattacaatgatttcttctgcatatcgcgccacatcattcatatcgtgtgacactaatatgactgttttatgatgattgacttgaattgattttattaattccatcacttgctgacgacttttggggtcaagtccagcagtaggctcatcaagaataattatattcggtttcattgcaaggatagaaactaatgcaattttacgcatctgaccacctgacatttcaaatggcgattgttccataatatgatgatcaaagcctaaatctaagagtaactgatacgcatatgacttaacttgttccacattcatcttaaaatttttaggaccaaatgccacttctctttccacactatcttcaaacaattgtgattcaggaaattgaaaaaccaaacctacttgttgtcttaattctcgtagatgcttgtcttttgttttatgagtaatctccttattatcaaaagtaatactaccttttgttggttttaatagcccattaaaatgttgaatgagtgtggatttaccacttcctgtttgaccaacaatcgcatagtatttaccttgctcaattttgagattgatatcatttaaggcttgatattcataaggagtgcctttttgataaatatatgaaacatgattaaattgaatggtcataatttatcaaccagcccttcatatgtagtgaattcatctttaaagcctagcttttgattcattttcattgcaaatggtaaatctaagccaatctctactaaatactgtgtatttaaaaaaataaaatttggcttgccttctttgtaaactttgcctttattcataatgacgacatgatcgctttctaacgcttcacttaaatcatgagtaatagaaataatcgttaaatttttctcttgtttaacttgtttaattaatgaaagtaaagactgtttaccttggggatctaacatagaagttgcttcatcaagaatgatgacatctggacttagtgctaagactcctgcaatagccacacgttgcttttggcctcccgataaagaatgtggttcatattccatatattctttcatatctacattatctaaagattgaatgacgattgctttcattttgtcatgagatactgcgtgattctcgagtccaaaagctacatcatattccacaattgaacctacaaattgattttctggattttgaaagacaataccaatatggcgtctaacctctcttaaataatcaggagtaactaaatgattgttatagaaaatttctccttcagttgcttgttctattccaactataagttttgcaattgtagatttccccgaaccattatgtcctacaatggatgtccattgatgttttggtatattaaatgacacatcttctaaagtgaaggccgcatctttttgatattgaaaatgtacatgtttaagttcgatgatattgttattatcagttttcacagccttcctcctttattaatagttactacaatagtttacatgaataaaaactagatgtacatgagtaaacgtctttcatatataaaaagagtcatacctcaaaagcacgactctttttaatcattatagattcattaaaattaaaaaagcgcgcaccccatcacattttagttgagttcacgctttatattagtatttagttgatggggtactctgagctagacaatatttgtatgtggcaaacattatcgttgcactcatttgctttaaatacaagtagttagtgtatttatatataaaattaatctactaattcgatgataactgattcagcaccgtcaccacgacgaggacctactttaagaatacgagtatatccaccttgacgttctgcataacgttcagcaatttcaccaaataatttttgaagtgcagtttgtgtagtttcatcttcatttaagatttcaacattacgtaatgttttagcagcattacgacgagatgctaagtcaccttttttacctaaagtgattaatttctcaacaacactacgaacttcttttgcacgagcttctgtagtttcaatacgctcacttacgataagtgatgtagctaagtcacgtaacatagctttacgttgatcagaagtacgacctaattttctgtaacccatgagttaacctcctttaacttattaatcttcttttcttaaacctaatcctaaatcttctaatttatatttaacttcttcaagagatttacgacctaaattacgcactttcatcatatcagcttcagacttgtccgctaattcttgaacagaattgatgcctgcacgttttaaacagttgtatgaacgtactgataagtctaattcttcgatagacatttcaagtactttttctttttgatcttcttctttttcaatcatgatttcagcattttgcgcttcatctgtaagaccaacgaaaatatttaaatgttcagtcataattttagcagctaatgaaacagactcttgtggagtaattgaaccattagtccaaacatctaaagttaatttatcaaaatcactactttgacctacacgtgtattttcaactgtatagtttacacgttcaacaggtgaatatagtgaatctacaggaattacaccaattggtaaatcactagtattattttgttctgctaatgcgtaacctctacccttattagcaacaagacgaatttttaaatgtccacctttagacactgttgcaattttaagttctgggtttagaacttcaacatcactatcgtgagtaatatcacttgctgttacttcgccttcatctctcacatcaatttctaatgttttatcttcttcagaatagatttttaatgctaattttttgatgttcataataattgtagaaacatcttcaacaacattgtctatagctgaaaattcgtgtaaaacaccttcaatttcgatgtacttaacggctgcacctggtaatgaagatagtaggatacgacgtaaggagtttcctagtgtagtaccgtagccacgttcaagtggttcaacaacgaacttaccgaatttagcatcttcactaatttcaattgtctcaattctaggtttttcaatttctatcatttacaaaatcctccttaataacgtcgaattaattttaaaattgtttcgctcagtgatttgtaacaataacaatcaataaaaattatacgcgacgacgttttggtggacgacaaccgttgtgaggtactggagtaacgtctctgattgctgttacttctaaaccagctgattgtaatgcacgaatagctgattcacgacctggtccaggtccttttactgttacttcaacagttttcaaaccatgttccattgctgattttgaagcagtttcagatgccatttgagcagcgaatggtgttgatttttttgatcctttgaaacctaatgcaccagctgatgaccaagataaagcattaccaaattcatcagtgatagttacgattgtattgttgaatgttgaacggatgtgtgctacaccattttcaatattctttttaactctacgtttacgagatacttgtttacgtgccatttatattttgcctcctttacctattattttttcttattagctacagttttaactgggcctttacgagtacgagcattgtttttagttttttgaccacgaactggtaaaccacgacggtggcgaataccacggtatgatgaaatttccattaaacgtttaatgtttaagttttgttcacggcgtaagtcaccttctactttataaccgtcaactacttcacggatacgacctaattcgtcatctgttaaatcttttacacgtgtatcagctgatacgttagcttcttcaacaatttttttagctgttgaagtaccgataccatatacgtaagttaatgaaataactacgcgtttttcacgtggaatatctactcctgcaatacgtgccatatatttttacacctctcttttattaaccttgtctttgtttgtgcttaggattgtcacaaattaccataactttacctttacgtttaatgactttacatttttcgcaaataggttttactgatggtcttactttcatttttatacctccctatattatggagtgacgattatttataacgatacgtaattctaccgcgtgataaatcatacggagacatttctactgttactttgtcgccaggtagaatacgaatataattcattctaattttaccacttacatgtgctaaaatttcatgaccattttctaattctactttaaacatagcatttggtaaagtatcaagtactgtaccttctaattctattacatcttgtttcgccattgattaacttccccctttttacaatagtaaggtaatcgtcaatagacaacttcaacgatacgaatctaatatagtgaatagttattataagtttaacaaaatgcgggaattatgatcgtcatacgacactcaaaaaataaattcttgccagagaaacctaatcaaagttcacataaatctagatcgcacattagttgacctattttaattgatctaagatatcaatgacatctttggttacttcgtcaatatctttcgcaccatcaatgtttttcaatacgcctttttcatcgtaatactctaaaattggcttagattgtttaacattaacgcttaaacgattagatactgtttctggattatcatctttacgttgataaagttttccaccatcgatatcacaaacaccatcaacctttggaggattaaatacaagatgataagttgtaccacatttctcacagatacgacgacctgtaagacgattcattagctcttcctcaggaacttcaatattgataacagcatcaatatttctatcaagctcagacataatgttgtttaatgcctcagcttgctcaattgttctagggaatccatctaataagaaacctttttttgcatcgtcttcagaaattctttctttaacgatacctacagtaacttcatcagggactaattctccacgatccatgtatgatttagcttcttttcctaaatcagtttcatctttaatcgcttttctgaacatgtcaccagtagatatatgtggtattgggaatttcttaacaatttcactcgcttgagtacctttaccagctccaggtaaacccattaaaatgatattcataaattgccctcctacaaattatctaccaccaaagcctttatattctttttgactcacttgtgcttcaagtgatttcatagtttcaattgctacaccaataacgattaataaacttgtaccaccaatttgaattgattgaggtaaattcataaattttgtcgctataattggaagaatagcaataactgctaagaaaatagagcctacaaaagttaagcgataaagtactttagtaatatatttttttgtttgttccccaggtctaattcctggtacataactaccttgttttttcaagttgtcagccattttttcaggattaacttgaacaaaggcatagaaatatgcaaatgcaataattaatataacataaacaatcataccataagtgtttgaagggttagcatattctgcaatattttgcgcccaatcagctttagggaagaacaatgttaatgttcttggcaataagaagaatgccatcgcaaagatgactggaataacccctgcagagtttacttttaaaggtagatatgttgcttgtgatcctaaacgttgtgcagattgttttttagcatactgaattggaattttacgtttcgcttccaatacataaatcgctccaattgttaataaaattaatccaacaattaaaccgatgacttttaaccatgctaacgttgtatcgtcattaccaacaaatgcttgttgcacaaattggataattgatgatggcaacgttgataaaatacctgcaaagataatgattgaaataccattacctacaccaaactgtgtaatttgatcaccaagccaaattaaaaatgcagttccagttgttaaaactacagcaatcaataaataactcatgacagattgatgaataatcaatttaccgcctaaatagttattaaattgaaatgccataccaattgactgtataaatgccaatatgatagcgaaataacgtgttacattgctaagctttcttttacctacttcaccttgtttagcccattcagtaaatttagggacaatgtccatttgtaataattgcattacgatagaagcagtgatgtacggcattatacccatagcaaagatagaaaagttctttaaggctccgccaccaaacgtattaagaagagcagcgacaccttgatcagaaccttgctgttcaaaaggctcaggattaactccaggagccggaatataagttcctattttgaatattactaacattgctaatgtgaagaaaatcttgtttcgaacttctttagttttaaagaagctcataaacgtttgaaacattagatcacctcgtgtgctccacctttagcatcgatagcttcaaccgctgaagctgagaatttgtgagctttcactgtcaattttttatcaagtgaaccattacctagtactttaataccagatttttcattcttaaccacaccagtttcaactaataaagctggagttacttcagtaccatcttcaaattgattaagttggtctaagttaacaatagcatattctttacgattaatgttagtgaaacctcgttttggtaaacgacggaataaaggtaattgtccaccttcaaatcctggtcttacgctaccacctgaacgtgctttttgacctttttgaccgcgaccactagttttaccattacctgtaccagcaccacgacctacacgattacgtacacgacgtgaaccttcagctgattttaactcatgtaatttcattatttaggcacctccttaattatttttcttcaactgttaataagtgtttaactttgttgatttgcccacgaattgcagggttatcttcaacaactactgaactattagtctttttaagacctaacgcttcaacagttttacgttgtgtttcaggacgaccaataacactacgagtgagggtaatttgtaatttagccattatttattttccctccttaattatataattcttctactgatttgccacgtaatttcgcaacatcttcagcgtttttaaggttttgtaaaccatttaatgtcgcacgtaccatgttgataggtgtatttgaacctaatgatttacttaagatatcagtgatacctgctaattctaatacggcacgtactggaccaccagcgataactcctgtaccaggtgcagctggtttcataaatacgctaccagaaccataacggccagtgatagtgtgaggagttgttccttctacacgtggaactactactaaatcttttttagctgcttctacagcttttttaatagcttctggtacctcttgagctttaccagtaccgaaacctacacgaccatttttatctcctactactactaatgcagtgaaacggaaacgacgtccacctttaacaactttagcaacacgattaattgtaacaacgcgttcttcaaattctttcgtttcttcttctctacgagccatgtatttgtccctcctttaaattaaaattctaatccgttttctctcgcagcttcagctaacgctttaacgcgaccatgatataaatagccaccacgatcaaatacgatttctttgatacctttatctgaagcttttttagcgattacttcaccaactttagttgataaatcaactttagaagtagaatcactagcgatatctttatcttgagatgaagcttgtactaaagtttcacctttaacatcgtcaataatttgtgcataaatatgtttgtttgaacggtatacatttaaacgtggtttttcagctgtacctgataatttagtacgcacacgagcatgtcttttcaaacgcactttgtttttatcaattttactgatcattgtattactcctttctttagagagttatctattatttaccagttttaccttctttacggcgaacatattcaccttggtaacggataccttttcctttataaggttctggaggtcttactgaacgaatattagaagcgatagctccaacttgttctttagatacaccagatactgtaacagttgtatttttctctactgcgaaagtaatgccatcttcagctttaatttcaacaggatgagagtaaccaacgtttaatactaagtcattaccttgcatttgagcacggtaacctacaccaacaagttcaagagttttaacaaaaccttgagaaacaccttgtaccatattatttaataacgcacgagttgtaccgtgaactgttctatcttctttagaatcagtaggtcttacaacttctagagtgttttcatcttgtttaaaagtcattctttcatcaaaagttctagttaattcacctttaggaccttttacagtagctgtttgtccgtcaaaagttactgtaacgtcactagggatgtcaataattttcttaccaacacgactcatgttatggcacctccttatttattattaccaaacgtatgcgataatttctccaccaacgttacgttttctagcttctttatcagtgataacaccttcagaagttgaaactaatgcgatacctaaaccatttaatactttaggcacttcgttcgctttagcatatacacgtaaacctggttttgagatacgttttaatcctgtgataacacgttcattgttttgaccatattttaagaataaacgaataacaccttgtttatcatcttcaacgtattctacgtttttaatgaaaccttcattttttaagatttcagcaatttgttttttaatatttgatgcaggtaattctaatttctcgtgacgcaccatgtttgcgtttcttacacgagtaagcatatctgcgattggatctgtcatagtcatttattgttgcctcctttcaaactcttttatcttaccagctagctttacgtacgccaggaatttggcctttataagctaattcacggaaacaaatacggcataatttaaatttacgatatacagaatgtggacgaccacagcgttcacaacgagtatattcacgtactgcatatttttgttttttctgttgcttagcaaccatagaagttttagccacttaattagcctccttttagagattatttacgaaatggcataccgaagtttgttaacaattcacgagcttcctcgtcagtgttagcagttgttacgataacaatatccattcctcttactttacttactttatcataatcgatttctgggaaaattaattgttctttaattcctaaagtgtagttaccacgaccatcgaaagctgttttagaaacaccttggaagtcacgtacacgaggtaatgaaactgcgattaatttatctaagaattcatacattctttctccgcgaagtgttacttttgcaccgattggcataccttcacgtaaacggaatgttgcaactgattttttagctttagtgattaatggtttttgtccagtgattaattctaactcttcaacagcattatctaacactttagagttttgaactgcatcaccaacacccatatttacaacgattttttcgatttttggtacttccattactgaactatagttgaattttttaactaagttttgagtaacttcagtattatatctttcttttaaacggttcaaagtggatcctcctttcaactagttattaattattagatttgatttcttcgccagattttttagcgatacgaacttttttaccatctacaaatttgtaaccaacacgagtaggttcatttgttttaggatctaataattgtacgttagaaacatggattgctgcctctgtttctaagattccaccttcaggatttaattgagttggtttttggtgttttttaataacgttaacaccttccacaacgacgcggtcttttttaggttcagtagcgattactttaccttctttacctttatctttacctgcgataactttaacgttgtcaccttttttgatatgcatgtgggcacctccttaaatattatggttttaataaattatagtacttctggtgctaatgatacgattttcatgaagttaccttcacgtaattcacgagcaacaggaccaaagatacgagtaccacgtgggcctttgtcatcacgaataatgacacatgcattttcatcaaatttgatataagaaccatcgttacgacgtacgcctgatttagttctaacaacaacagctttcacaacgtcgccttttttaacaacgccacctggtgttgcatttttaacagtacatacgatgatatcgccaatgttcgctgttttgcgaccagatccacctaatactttgattgtaagtacttcacgagcaccagagttgtctgctacttttaaacgcgtttcttgttggatcattagttaaacctcccttatctctaatcttgtattaaataattactgattcttcaacaatttctactaaacggaaacgttttgatgctgataaaggacgagtttcttgaattctaacaatatctcctaatttagctgaattgttttcatcatgagttttatattttttagagtattttactcgtttaccgtataatttgtgtgttttgtaagtttcaacaagtacagtaattgttttgtccattttatcagaaacaactttacctacataaactttacgatcatttctttcactcacttttgtaacctcctctttcttatactttattgattagctttactttgttcaatttctctttcacgagcaacagtttttagacgtgcaattgtttttctaactgtacgaatacgtgcagtttcttctaattgacctgtagctaactgaaagcgtaggttaaaaagctcttcttttgaagatttgatttgttcttcgatttctgaagtggttaagtctctaatttccttagctttcatttgtttcaccacccaattcttcacgttttacaaacttagtttttactggaagtttgtgacttgctaaacgtaatgcttcacgagctacatcttcagatacaccagcgatttcaaataaaatacgacctggttttacaactgcgatccagccttcaacagcacctttaccagcacccatacgtacttctaaaggttttttagtgtaaggcgtatgtgggaagattttaatccaaactttcccgccacgtttcatgtaacgtgtcatagcgatacgagcagattcgatttgacgagatgtgatccaagaagttgttgtagcttgtaaaccatactcaccaaatgttacaaagttaccgcctttagaacgaccagttgtttttggacgatgttgacgacgatatttaacacgttttggtagtaacattattattttcctccttcactagtattcttagtaggaagaacttcaccacgataaatccatactttaacacctaatttaccataagtagtgtctgcttcagcatgtgcataatcaatgtcagcacgtaaagtatgaagtggaacagttccttctgaatattgttcagcacgagcgatgtcagctccgcctaaacgacctgatacttgagttttgataccttttgcaccaagtttcatagctcttgtaatagcttgtttttgtacacgacggaatgaagcacgattttctaattgacgtgcgatattttctgctactaaacgagcatccatatcaacttttttaatttccacaacgttgatgtgtacttttttatcagttaagttatttaatttattacgaagtttttcaatttctgaaccgcctttaccaattaccataccaggtttaccagtgtggattgcgatgttaatacggttagcagcacgttcaatgtcaacgtgagaaactgacgcttcttttaattcgttatcaatgaatttacggattcttaaatcttcgtgtaataaagaagcgaaatctttttcagcgtaccatttagcttcccaatcacggataactccaacacgaagtccgataggattaattttttgacccacagtattccctccttaaatagttattaagcttctttagcttcttctttaccgtcacttacgacgattgtaatgtggcttgtacgtttgttgattgcacttgcacgaccttgtgcacgtggacggaaacgttttaaagttggtccttcatttgcatatgcttctttaacaactaattcatctgtattcatgtcatagttatgttcagcatttgctaaagcggacattaatactttttcaattactggtgatgaagctttattagttaattttaaaatagcaatagcttctccagcatttttacctctaattaagtcaagaactaatcttactttacgaggtgcgattctgattgttctagcaaccgcttttgcttccattaggatatcctcctctacttatatatattattatctactagtttttttatcgtcagctgcatgtcctttaaatgtacgagttggagcaaattcacctaatttgtgaccaaccatatcttcagttacataaacaggtacatgtttacgaccatcatatactgcaaaagtatgaccgatgaaatttgggaaaattgtagaacgacgtgaccatgttttgattacttgtttcttttcacttccgtcttgagcttctacttttttcattaaatgatcatcaacgaaaggtccttttttaatactacgagccatttgggcgcctcccttcttattgtgtgcgtgcagctgttaagccgcacactcaaataagttgttattattttcttttacgtccacgaacgataagtttatcagatgattttttaccgcgacgtgttttcttaccaagcgttggtttaccccatggtgacattggagatggtctaccgataggagcacgaccttcaccaccaccgtgtgggtgatcgttagggttcattacagaaccacgaactgttggacggatacctttccatcttgaacgaccagctttaccagcgttaacaagttcatgttgtaagttaccaacttgaccgattgtagcacggcaagtagataaaatcatacgtacctcaccagaacgtaatctgattaatacatatttaccttctttaccaagtacttgtgaacttgcacctgctgaacgagcaatttgtccacctttaccaggttttaattcgatattatgaattacagtaccaactggaatattttgtaatggtaaagcattaccaactttgatatctgcttcagcaccactttcaactgtttggcctacttgtaatccttttggtgcgataatgtaacgtttttcaccatcagcatatactaataaagcaatgttagctgaacggtttggatcatattggattgaatcaactttagcagtgattccgtctttattacgtttgaagtcaattacacgatattgacgtttatgtcctccaccatggtgacgaactgttaatttaccttgattgttacgacccgcttttttcggtagcggttgtaataatgacttttcaggtgtagtcttcgtgatttcagcgaagtctaacgtagtcatattacgacgaccatttgtaattggcttatattttttaagagccattgtcgcttacctccttaatggtaatattattttattttagttgaataagtcgattgaaccttctttaagttttacaatcgcttttcttcttttatttgtatagccttgataacggcccatacgttttttctttggtttgtagttgatgatatttacactttcaactttaacgtcgaaaatttcttcaactgcaattttaacttgagttttgttagcacgagtatctacgtcaaaagtatatttatcttcagccattgcttcagaagatttttcagtgattacggggcgcttaagaacatctctagcttccattatccgagcacctcctcaacttttttcgcagctgattcagtaatgattacactgtcagcgctagtgatatctaatacgtttaatccttgagcagtacttacttgtacgccaggaatattacgtgcagataattcaacatttacatcttcgttttctgttactactaacacttttttaggttgttcaagtgtagttaaaacatttttgaattcttttgtttttggtgcatcaaaaccaaaagtatcaacgattgtaaagttgttttcttgaactttgaaagataatgcagaacgtaatgctaaacgacgcattttcttaggcattttgtatgaatagcttcttggagttggtccgaaaacgataccaccaccacgccattgtggagcacggattgtaccttgacgtgcacgtcctgtacctttttgtctccatggtttacgtccaccaccacgaacagctgaacgatttttcactgcgtgtgtaccttgacgtaaagaagcacgttgtaaattgattgcttcgaaaagaacactgttgtttggttcgattgcgaaaactgaatcgcttaattcaactgaaccagattttgatccgtctacttttaatacatcataattagccattatgctttttcctcctttcgctacttattatttattaccttttttaattgaagatttaatttctacaaaaccttttttaggtccaggtacattaccttttactaaaataacattgttatcaatatcaacttgaacaacttctaagttttgaactgtaactgtgttaccgcccatacgtccaggcattttttgacctttaaatactcttgaagcatctgaagccatacctactgaacctggagctctgtggaaatgagaaccgtgagccattggtccacgaccttgaccatgacgtttaattgcaccttggaaacctttaccttttgaagttcctgtaacatcaataatgtctccagcttcaaaagtatctactgtgacttcttgacctacttcgtattcatcaacattaacgtttctgaattcacgaatgaagcgcttaggtgctgcgccagcttttttagcgtgaccttcagctggtttatttgcatatttatttgatttagcatcttttttatatgcttgtttgtctgcaaaacctacttggatagcattgtagccatcaacttcttcagttttcttttgtaatactacgttttgatttgcttctactactgtaacagggattaattcaccgttttctccgaatacttgtgtcatcccaatttttcttcctaagattcctttggtcatcgaaagtccacctcctaaattgatctattataatttaatttcgatgtctacaccagatggtaagtttaagcccattaaagcatcaactgtttttggtgttgggttaacaatgtcgattaaacgtttatgtgtacgttgttcgaattgttcacgagaatctttatacttgtgcaccgcacgaataattgtataaacagatttttctgttggtaacggaattggtccagatacatctgcaccagaacgtttagcagtttcaacaatcttttctgctgattgatcaattacacggtgatcataagcttttaatctgattctgattttttgttttgccataattttccctccttgttcgtctacattgaagtgatagacttctccacgaaaactatctcacacaacgccatggcaaagcggccgggtgtgtcagtaacctttcgcttcatcgctttctttaagtccaacattaaatatgttacaagaaaaacactgataaatcaaggtttttctttaactttttttatttacgtctaacacatacttaagtattgtactggaaatttttatgtagttcaaccattttgagtaaattttttcccttttttctataaacctttataatagatatagagagtaatgaattttgaaattatagctatacatttttaatgctaatttattttaaaattcatgaactttatcggaggtgaatataatataaatgaaaagaaatgtgaaacttactttagcaattattagtatcttcttaatagctagtgaatttttctatggtattccttttttaggaggctcagttattcttggctttggttggcaacctttattattaaatgctttactttatcttattttaggaatcattctattagtagattctcaaaacacaattaagccaatggcaatgattccatttattggattaattggatcatttgttgcttttctacctattattggtatgtttacgcattgggtactctttttcttaatggtattctttatatttgttgtgctcaacgcaccaacttacattccaaataaagattctaaagttatttatactcaatacaaagatgataaaaacaattaataatttcaatattaaaaagacacatttaattcaaaaattaaatgtgtctttttatgtctaaccgtgtacaaacacgaagtataaaataaataataccattaatacatacatgataggatgaacttctttatgttttttagtaattaacattgttattggatagaagataaacccacatgcaatacctgtagcaattgaatatgataaaggcatcataatgattgtaataaatgctggtactgctacttcaaattttttccaattaatttcagcaaagtttgccgccattaaaataccaactacaactaacgctggtgttgttactgcacttgtaacgacttcaattagtggactaaagaataatgctaataagaaacaaaaaccagttatgatacttgcaaaacctgtacgtgctcctactgcaacaccagaagtagattcaatataagaggttgttgtagttgtaccaaaaatagccccaacaattgtagcaagtgagtctgcaaataatgctcttccagctcttggtaacttattgtctttcattatacctgcttgggttgctactgctactaaagtacctgcagtatcaaagaaatcaataaagaagaacgttaaaataacaataagaaattggatagtaaataattggcctggatctttaaatgcttcaaaagctgctccaaatgtaggtgtaatacttggaattttacctacaatacctgatggtgtatgaatttgacctgtaatcatccctacaattgcagttataatcataccaataaaaattgaacctggaacctttctagcatataaaatgattgttatagcaatcccaaatatagctaaaagtactgatggtttagttaaatgacctaatgttacaagcgttgaatcattttttacaataatacctgcactttgtaaacctacaaaagtaataaatagccctatacctgccgaaaccgccattttcatttcatagggtattgcattaataattatttccctcaatccagttgctgttaatatcgcaaagaatatacctgaaaatagcacacctgttaaaccgatttgccaaggaattcccattgttaaaacaactgtaaatgcaaagaacgcatttaaccccatccctggggcaagcgcaatcggatatcttgcaatcagtcccatgaataaagatcctacaaaggctgctaatgctgtcgctacaaaaatggcaccttgatccattttcatatcaccagatatacctttaacacctgctaaacttaagacttgaggattcacggctaatatataagccattgataagaaagttgtgataccaccgatgatttctcttttgtagttagtaccatactcgtcgaattggaagtattttttcacagctttaaactcctttttttgaaatactttaatagtttaatattacttacttaaaaaaacaatactaaaaacgaacttttatcgacttatttcattataagttcgattttagttaaaattttaagttctttaatgcatctttaaaaggattattatccaattcatcatgattattcatatattttttcatatcttttttagaaactttaccattatttttatttttcaatcgttgatccatttgtgcttgggtttcagtatgaccgcatacacatcggtagaccgcttcttttcctcttccaaacaatgtcattttctttttacagttaggacaacgtgcattcgttttacgttgaatattctttttagtatgacagctaggatcttgacacactagcatttgtccgtttttagtttttacttttatcataaatttaccgcaattgggacattcagtagaagttaaattatcatgtttatatttttgatcactatgtttgatttccccaacaatttctttagtaaaatctttcatctcattaataaattgtttagcgttatatttacctttctcaatagaaagtaatttttcttcccattctgcagtcattaaaggagaagtcagcgctttaggagaaagctctaatatttgttttcctttagatgtcacttttaatttcccatcttttgattctattgcattaatattgaatagtttttcaataatatctgcacgcgtcgctactgttccaattcctcccgtcttatgaagggtattagcgtactttttgtcattcaattgaatataattttgtgggttttccatcgccttaagtaagctaccttcattgaaatattcaggtggtgttgtttcatgttcgtttactttgacttgttgtacatgataggtctcttccttgctaaaagtgatagccttattagcagttgaatcattgttactaagtgctttaaatcctaatttacgtgtgacgtttttggcatgtttaaattgatattctcccacttttaaaaaaacctgtgtcgcttcatactgataaggatccattaatgtttctaaaaatcgttgtgcaaccattaaatatagttttgtttctctgttagttaatgtatcaaagttgggtctaatttcagttgggataatcgcatgatggtctgacactttttgattattaaaaatatgcatcttagttgtaaatgacttagtcaataactgacgagcatgtgatttataatcagtcgctaataaggcttggagacgttcttgtatggtatctgtcatatcgttagacaagtagttagaatctgttcttggatatgttaatagtttatgacgttcataaagactctgtaaggtatttaaagtttctttgggtcccattttaaatcgctggtatgatgcttgttgtaaatcagttaaattatataaaggttttgcgtaagattttttttgcttaattgaaacatcttcaatctgacctgattgtccttctatttttttagataatttttgtatttcttctttattagtaaatctttgattcgtttgaatatcaaatatagcgtcatttacatttaaagaaagtgtgtaatacttttgaggtttaaaatgattaatttcttgttgtcgatgataaaccagttgaatcgttggtgtttgtactcttcctaatgaaagttgagcatcatatttagttgtcagtgctctagtagcattaatacccactatccagtccgcttcacttcgtgcaagagctgcttgatacaagtgattatattcacgtccatcttttaaatgtttaaagccttgttgtattgcttttttagtcaccgaactaatccataaacgtttaattggctttttattttttactttatctaagatgagacgtgctaccagttctccttcacgtccagcatctgtagcaataataatgtctttcacatctttatttaatattaaagattttacaattttaaattgtttacttgtcttacctatgaccacagtatgcatttgcttaggtaatataggtaaatcttctaatttccattctttatatgttttgtcataatgttctggttgagcatttgttactaaatgacctaaagcccatgtcactatatagcgctgatttgcaatatatccattatatttttctttaatatttagtgcttctgcaatatctctcgctactgagggtttttccgctagaattaatgatttcattcaaatttcctttcgcattcttactttttattttcatacgtttaatattgtaacatgtatagcaatagtgttactttccatctcaacttattaatttaaagtaaaacccctatattaaattcaacttactaaaatacttaggctatacatttttataatattagtcttttatattttataaaaaaatgagcaattgcgttttatatcaatcacaaataatataaaatattcaccaagtgttatggaaaggaaagcacttatttttgaaaaggagagtgagtaataaatgcagattattaacatattaatcgccttattacctgcattattttggggaagtctcgtattaatcaatgtatttgtaggaggaggtccatacaatcaaattagaggtacaacgttaggtacattggttattggtttaatcttacttcttacaggtcatgcacaatttgataaccctactgtcatcattgtagggttaatttctggtgcaatgtgggcattcggtcaaggaactcaattacaatctgttaaccttgtcggcgtatctaaaacaatgcctatttctactggtttacaattagtaggtacaactttatttagtgctatctttttaggtgaatggagtactggattacaagttactttaggacttattgcaatggttttattagtaacagggattgcccttacatcactaaaaggaaaaaatgagcgttctacaaaagatcctaattttagtaaagcaatggtgattctagttgtaggtacattaggttatgtaggttatgtagtaatcgggaatatatttggcgtaaatggtactgatgccttattcttccaatcagttggtatggctattggtggatttttactttcaatgagacatgaaacaaatattaaatctaccacacttaatattattccagggattgtttggggaataggtaacttatttatgttctattctcaacctaaagttggtgtagcaacaagtttctcattatcacaattattagttatagtttctactcttggtggtatattcttattaggtgagaaaaaagatcgacgccaaatgattgggatttggtcaggtattgcgttgattatcatcgcagcaattatattaggaaacttaaaataagtatattgaggaggttatacaatgttttctgaattagaaaataaagttgttgttattactggctctggcagtggcataggaaaagcaatggcggaagtttttggtaaagaaaaagcgaaagtagtcttaaattatagatcagaaagtcatatgaaagaacttgatgcccttcaagaaacaatcaaaaaatctggcggtgactcaattacggtgcaagccgatgtttcagtcgaagaagatgtgaaacgattagtagaaacggctgttaaagaatttggaacaattgatatcatgattaataatgctggttttgaaaaagccactccaagtcatgaaatgtctatggctgaatggcaaaaagttcttgatattaacttaacaggtgcatttattggttcacgtgaagcggtaaaacaatttttaaaagaagataagaaaggtattattattaatacttcaagcgtgcatgataccattccttggccaaattacgttaactatgctgcaagtaaaggcggtcttaagttaatgatggaaacaatgtcaatggaatatgcccaacacggtattcgtattaataatatctctccaggtgccgttgtgactgagcatacaaaagaaaaattctctgatccaaaaacacgtgccgaaacattagaaatgattccagctagagaaatcggtgatgcaaaagatgtagcaaacggtgcattgttcttagcttctaatttagctagttatgttcatggaacaacattatatgttgatggtggtatgatgaactatcctgcatttatgggtggaaaagggtaatcatactataaagtaaaaaagcaagcgatgattaaaaatcgcttgcttttttcatatatatatagtttttatacaaagatagcttgataaatatatataataataatacttatcacaatagaaatattagtaatcattccaactaatggcaatgttttatatttaaactgaattgaatatggaataattgctacacccacaggaagtaaccatgtaattaataacgttgttttaatcatatcatccgatgttggtaagaaaaagtggactaataaaccagcaatacatccaagtccgtaatggacaattaaatatttcactgcaattggtaaaaattgtttttcaattctgaagctcaacataattccaagtaaaatcattgataatggcatgttcgctttagaaataatggtaaaaaagtcaattgaagcttttggtaaatgaatattagccatattaagtataaacattacaatataagtaacgagtggtactgaagaaattaactttttccctaaaaatttgaaattaaattgatcactaccttcactgtaataactacctacaaagtaagtgactccaaacataataattgccccaccgatatcggccataccaaaataaatcataccattttcaggccaaattgtttctacaagtggataagcaaataaaccaatgtttaatgacgctgccatcatacctactgaacccttgacatgattatcatattttctaaataatgcaaccataattactttggccaatatgccatagatgagcatcataattggtaaaatagaaaatgataaatcaagattcgcactatttaaattgacaataactaaagaaggtaatgtgacattcaatacaagcgtagacaatacttgactatctgcagacttaataaaattaatacgtttaagtaagtaacctaatgcaattaacaaaataatgattataaattgctcagtcacaattcatcccttcttccctaatattccattacaactaattactctaacacaattaacagtatttttagaagttacttgtttcatgctataatcattactaatcatattaataaataaggagttcgactagacatggacttagaatcacaattagctgagcttaaatacgattatattcgtttacaaaatgatttagagaaaaaagaatcactaaatcaacagattgatcctttagtaaaacaattagaagaaattgaaaaagaaatttcagacatacgttcaaaattacgtcagaaataatttttcaatatatctaggcattaaagttcatgaatgctatgatattagtcgtaatagaaaggatgtcatcaagtgaaaatatacttaattttattacccatattgtatcttattgtgagttatatcagtatttttaaaatgaaatcaatgttcgtacatattttacgtattattatgggaatattattattatttgtagtagctatcactacgatccaatttcctagtgaaaattggtgggtatttgttgtattgcttcttcttgtaggaaatgtagaagttacagcttttaaagcacttaaaaacgattataaaggtgtttcaattttaaatattatatctattattatttttgtaatatatattattttaacttttactatgtattaataaaaaagcaattgaacgtatgtgcatacgtctcaattgctttttttgacttatcctaaatttatctttatttacgtgtaagtttgttttttaaagtaaagagtatttcatagataactggcactacgattaaggttagtagtgttgatgatactaatccacctatgactgtagcggccattcctttagaaattagaattgaactattttgcccaaataataatggtaataatgcaccgattgttgcaactgcagtcatcaaaataggtctaattcgggttccacccgcttcaattaaagcttctttcattaacataccttgttgttcatttgaaatcactctatcaattaatacaattgcgtttgtaacaacaataccaattaacatcaacataccaattaaacttggtactgaaatggtttctccggtaatcaataatgcaaatactataccaatagctgtaaatggtaatgagaatagaattgtaaatggtgctaaaccacctttgaatgtgataaccaacacaagatacacaataacaatagcaataagcattgcaaaagcgagttggctcatagctgtattaatatcatcttttgcaccaccaacattaaacttaacgttattaggtttatcaattgtattgatttcacgcatcactttactagaagttccaccaacatcagaagcggtaattttacctgaaattgttgtagcataatcgccatcttcttgaacaagtttacttggtgttgttgttttgtttagacgtgcaatatcttttaatttaacagtttctccacttggtgcatgtaagtcgatgttttctagtttattttgagaccaatttgtttgtttattctgttttacttttacatctatattattaccattttctttaacagttgtaattgttttttctggtaagttctcatttaaattcaatgctaattgtgcagctgaaatacctttatctgttgctttattttgatctactttgatttcatattgatcataggtttgtgataaatctgaattgacatctgctacacctttaatggatttcattttattttcaactttagttactgtacttctaattgcatcagtagaaggtcctttaacagttacgtccactgaattgtttccagctcctgtacctaagtcttgatttttccatttacctgggtttttcattttagaaagatgtgtaaccactttatctggttcttcctcaaagtgcggtgtatccgaatcatattccaccataatagccatgctattcgtacttcccgttggatctgctggagaaggtccccctacagaaaattgaactgttttaactttatctttactttgaaggtatttttgagctttttcagcatgtttaagtactgcttcttcagtttctcctggtttaggtgtataagttaacgctaaaaacttatcttcccctgtagaaatataacttgttcctaatttagctgcaccaattcctatactcgcaattaatataacaatactaataataagaacaagccatttatgattaagcgaccaaccaagtactcgtttatatcccttactaatccctcctaatttattttcttcattaacattgccctttatgtttattccatttttaaagaatgttgaggcaagggctggcacaacagtaatagaaacaagaagcgaagccagtaaactaaatgtgatagctaacgcaaatggtcggaacatttcacctactgagccggaaacaaaagctagcggtaagaaaactataattgtaacaatcgtagaagataaaataggtttaaatacctctctcgttgcactaataactaaattgttcccttttaattgttcacttggatctgataatcgtcgatagatattttctactacaacaatagaatcatctatgacccgaccaatcgcaatcgtcaatgcacctaaagttaaaatattaagtgatacattacttaatttcagtgcaataagtgcaatcaaaatagataacggaattgaaacgatagatatcgctgttgttttaatatttcttaagaataataaaataacaataattgcgacgatggtacctaatgccgctttttcaatcatagtatataatgaatcttcaattggtttagctgtgtccattgtttttgtagctttgatatcactattattcttaacaaactcgtctattttcttttgcgttgctctagccatttgaactgtatttgcatcttgtgctttcattacttgtacgttcactgcgtctttaccatttgtttttgaaatagaatctcgttcatcgcccacagtgatgttagctaaatctttaagtggcacgcttggcatttgaccatttgttccttttaaagagctattcgtttgcgattgacttgcactagatgattgactaccttcttggccagtactactaatactattatcgttagaatcacttgattgtccttggcctgctatagaaagcgggatgtttaaatcttttaatgcactgactgatttaaattgaccatccacaacaagggatttttcattatttccaaattggaataaaccgagtggtgtttctcttgtcgctgtcttaatgtaattttcaacatcctccgcagataatcttactttatccaattccttttgtttaaattttaaagtaacttgacgtgtagtttgtccattcagttgtgcactttgaacaccatcaacagtttgaagtttaggtattaattgttcattaatttcctttgtagtggttcttaagtcattactcttatttgtaaatgagtaagctacgataggaaaagcatcgatagaattacgtattaattctggttcgcttactccatctttaaaatcgattttgtctatttcttttttcagtacttcttcagctttatccatgtcagttccgttgttatattcaactttcacaattgaagcattaggtatcgattgtgtttctacactttttacataagcgagtgatctgacttgtttatcaattttcgagctaatttcaccttgtgtcgtttgaggtgtagcgcctggcatcgtcgtttggacagaaataattgggttttcaacatcaggtaataattctaatttaagtttagcacttgaatatatgccacctataatgactaaaagaaccattaagaaaatagcaaacttattacctaatgaaaattgaagcatctttttaatcatttagttacttctcctataataagttattaatattggtaaaaaaatctgaacgtttcttcacagaatcgttcagattaaatactgtatctacaatattgtaaattatttacgttttaatttgcgagagagtttaattttggcttttgtaagtcttggtttaacttgttcgattaattgatataacggttgatttaagacataatcaaactcaccaattttttcacttaaataagtgccccatacacgtttaaaagcccataatccatagtgttcagaatcttttgatggattattatctgtgccaccaaagtcatacgttgttgcaccatgatctcttgcgtatttcatcatttcatattgcatatgatggttcggtaagaaatcacgataatcatttgaagaagctccatataagtaatatgattttttacctgcaaacataagtaatgcgcctgataaatatacgccttctggatgttcttgatttaatctttctaaatcttcttttaattcagttgtcttagaaatcttattttttacatcatttaatttgttagctgtttttttatcatttggacgtgcttctgacttcgcttctagtttagctttttctgcttcttgagcttctagatctttattcgtttcatcaagcacttgttgtggctctaatttcactaagaataattctgcatccccatcttcatgtaatgagtcataaatattctcaaaatagctaatatcacgtgttaagaagccatcacgttcacccgtaatttgcattaatttcgcaaatgttttaagcccttcacgatttgagtgttcaactttagtacctcgtttaagcgctaatctaactttagaacgattacgacgttcaaagttttgaataatttcatcatcagttttatcaataggtgtaatcattgtcatacgaggttgaatatagtcttttgataatccttctttaaaccctttatgtttaaatccaagcattcttaaatttttaagtgcttctgtgccatgttctacttcaacatctggatcaatcttaatcgcatacgctttttcttctttagcgattttttttgtttcatttaaaagtgctctcagtacatctctattattataatcggctacgaatccacgtgatacataacataatgtaaatggtaacttcggtatctttttaaataataactgtcctacacctttaatttcaccattttcacctactgccacacgttttgaataccatccagttaagcgctttgtctctgcccactttgtcagttgcaataaatcaccattcggatgagtttttacaaattcgtcatgttcctgatttgtgatattcatcttttccatgctatataaaactcctttatctttgcattacttatcattatacattgtagatttgagagtgtcgacaaactcataatagaagttgaattttcttcaaaaagctattctttttgttatacttaatgaatgaaaaacactactattttttattaaagaggtttttaaaattgagaaatataattttacttatatttattgtatgtaatgctattgcaataatttatacaatggctcatcctttaactataaatttttttagtctgagagtgatgtttgtcgctttatcacttgtacttaccattttatttatattattaaaaacaaatcgtttttctttaatactaagcttaatctctctagtactagtttttattcatattgcttttatcgcacatagtacttatacctatctatttaattagttccttcattaggttcgaaacgatatttggctcctttaataataattgaataaggagtcgtagtttcattatctttaaaaacaatggtattgtatccagattgagccgcatcttgaatccgataaacgatagtatctccctctaattttaagtcagtgtagttctcattttcttctataatgtccatattaaaccagctttgccacttagttaaggttttagagcgtttagaactatctataataattttatcaattttaaattgtttctgaaaaaacgaatctaaattttgcatatgatcgactttatttttattccactcaataaaaaaaggaggccttaccatatagtcgggatcagcgatgtagagtaacttccatcttatcttttcaccctttttattttctctgtccatatttataggaccaatcgtatcaatatgacgttcgtttaaagattgttttactctctctatatcttccgttctaaatgccattgttttaaatccttgcttaaaatcatcttgaacaattttcgttgcaaaagcgactctaccctcttcagttttagcttctttctttaacttttcaacatcttcaacatctaaaagttcgatgtaattttcatttatataagttaaacgattgaaagtgccatattgatgatgcttgcctccagaatgaatttttaataactcacctggatatttaaatccttttaattgatcgacgtaatgaatcatatgatcaaatttcaacttcatgtatcaatatcccctttactaatttaaacttaattgtattttaacaaatttcactatactttactctataacttatatttagtgttgaaaaacgaatgaaatcggcgtataatatttttcgtcatcaattagttagccttgctaactattttcgagggagataattcaaaatgcccacaaatgaatttttcaatagttttattggtatttatcgtccttatattaaacgtactcaacctatattagatcagtttggtctacatacaggtcagtggttagtgcttaaagatattgctacatatgatcaaacgactttagttcaaatatctaaacgtcgttttattgaaaaaccaactgcgcgtaaaattattaaagtactatttgaaaaagatttacttttggttacttcaggtactgacaaacgtgaaaagctattaagtttatctgaaaaaggacagcaattatttgaggacattaatgcttgtattacacctattcaagaagatttaatccatcaatctaatatatctaatgatgatttggatcacgtcatagcaattatgaaaaaattacataccacattatcgaagggggatcttcatgaatcagactagtactactaaacaacctatttttactaaaagttttacaatcaattttatgattaatttctttgtttatttgtgtatgtacttattattagttatcatcgctgattattctaaaacattctatcatgtgtcagacagcttatctggacttgttgtaggactatttattatcggatcattgattggacgttttggaacgggaaagtatgtcaatcgttttggtcctaaaaagattttaattgctggtttaatttttctaatcattactcagttactttattttatctctggatcgataaccatcttgatgttagtacgactcctaaatggaattgctacagctatcgcaacgacagctacaggtacaattgctgcacatgttacccctgtagaacgtaaaagtgaaggcattagcttattttcactaagtcttgttcttggatcagccattggtcctttctttggaattttattattgaaatcattctcaattaatttactatttcttatctgtcttatactaggaattgcaagtttaattgtttcagtctttattaaaattgactttaatcctactaaaaatgcaattgatagaaaagtagcccaagcttctggtttcaacattcataatttcattgctaaagaagctgtaccagtagcaattgtgatgatgattatagggttgaactatgcttcaatcctaacattcttaaaatcttttgctgagcaacgtcatttgttagaagcatctagttatttctttattttctatgcgatcgcttcattaatcactcgacctattgctggtaggatgattgatgcaaaaaatgaaaatgttgtggtttatccagcatttcttgccttaattatcacatttgttttattagtatttagctataatggttgggtattattacttgctggcgtgttcttaggtattggctatggaaatctctcttcttctatgcaagccattgcaattaaagtgtcaccttcaagtaaatatggaattgcaacttcaacttactttattggattagatattggtattggttttggtccatcgttgcttggattatttacaagtgcaatcacgtatactcaagtttatttcattatggctattgtagccgctttatgtacggtactttatttaattgttcatggtagaaaagtgaatggtaatacgtattaatctttcatttaatatataaaaagaagcacccctttgactcgttatagaatattagaggtgctctttttatttaattaatttgcaatactaatagcttcaatttcatttttcattttatctaatactttttgttgcgacgcattaaagaaataaaatacttgtcgttcatctgtttcagaacgtaatttagaaattaattctttcttgtaaattttgcggatgatgacgtcaattttacttgtatcccataacatttcaaaatgtaatgtatcgcgtaactcttttccgctaatttttttaccttcatacactttaaataaaacaacaaattcctcaatagaaattttatacgtcattttcaaccaatgcttcaattgactaagttctctttccgcttcaataaagcgagtcactttattattcatagtacatgcctccaaagttgattctaagttgtataaatacataatataataaaattgcttaatttaattatataacatatgcacaatttaatctattacaaatattaatttatatctgtttagtgattaatataaattactttgaaattattaaaattaattaaaaatactatcaaattaaaatacagaagtaagtgatatcacatatgattatcacttgcttctgtatagattaaccaccaatataattcatattaattttctttcgttgtcgatttcttactgtttgttctgttcgttcatctgaataacgatcatcacgtgcttgccataatgaaatgagcgtgtcttttaatttttgatgtgtagcaccactacgcaataatgatttaatatcaaaaccatcaatcacactaaataaacatccataaaatttcccatcagatgataatcttgctcttgtacaagtagaacaaaatgaagctgaaacacttgtgattagaccaaactgtgcaccattatctttatgtctataatatgtggcaacttcaccaaaatatttaggtggaagaggttctatatcaaactcttcttcaatagtagatagcatttcttctttcgtaacaactttactaaaattccaaccattatcattacctacatccataaattcaatgaatcttatttgaatatgtttatctttaaaatattcaatcataggtaggatttgatcatcattaattcctttttgtatcactacatttacttttacatgaaatccaatagatattgcataatcaatttgttgcaagatggtagaagctttaatgttacggttattgattgcttgaaatacttcatcatcaattgcatctaaacttacattaattctacgcaatcctgcatcatacaacttttgaccatgtttttttaaaagtaaaccattagtggtcataccaatatcttcaataccttcaatatgattaagtttttcaattaatttatataaatcacgtcgtaataaaggttctccaccagtaattcttaattttttcacgcctaattcagcataaactttggcaattgctgtaatttcatcaaatgtaagtaattcctctttaggtaaaaaaacaaaatcatcaccaaatatttcttttggcatacaataatcacatctgaaattacaacgatctgttacagaaattcgtagatctcttataggacgtcctaatttatctttaatttggatcgtcattaacgtgtccccctttaatcattaatctgatgaagtaaagtattcaaatcatcttgataattaatatttttagaccaattttttaaaggctgaacctctttagtatctagaaaacatgttatcacatttttatatacatgctgtaaactataatcattagaattgagtgctttttcaatattcgaaatgactcctcgactataaaaagcaatggtcggtataggtttatcatcgtctgaataagctataatatcggcttgatgttccatacgctgtgaaattgtaaattgatatagttgacttattgcttctttagtaatcataggagtatctacagagaccacaaaaaataattcttcattattataatgtttcataactgtgtagattcctgataacgggcctttatctgcatgtgtttcttcatctaccataatatgtttatactcaaattcattcttaagttgtttgtttgtacttataataatatcgtcaaataaattcgtttctgttaatgtgttaataattcgtttatagaacatttccccgtgaatacaagcaaatgctttaggactaccaaaacgtttagagtgtcccccagctagaataattgctttcatatttaaccaccactaactggaggtattaacgcaacaacatcatcttgctttacaatatcattaagttgaacaaattcttcatttacagctacttgaaattttttatcacgaatggatgggtgacgttcaaataataattctttaaacgtttctactgtaatatcttctattaaatcaatgtcttctgaattcatttctaatatttcttttatttctgcaaaatataatactctcatttaagcctctcctttagttgcttgactataatctcctctttgatgtccttgccattctgcaccgtcttcccaaatttcttttttccaaattggcacaacttctttaattctttcaatcgcatactcatttgcacgataggcatctttacgatgtggcgaagagacagcaatcaatactgcaatatcagagatttgtaggggaccaatacgatgtacaatcgttgttatcgttcctggccaacgctgtgtaatttcttctccaatttgttctagttttttttgagccattggaacataagcttcatactcaagatattctgttttcacccctttagtccattcgcgaacatgacctgtaaatacaacaacagctccttgatgttcatttaaagtaaatgttctatattgttcgggctcaattggattcgtcacgatttcaaattgtttcatttttatgttcatcctttcgtttcatccattttagtaaccattgctcatagttttttaaagcattctcattattataattataaaaatattgaacatgtgtaagaagtctcagttcttctaattcttcttgggttttatataccactattttgtcataatcctcatttttaaacccttcaactaaaataacgtcataactaatagttacactttcttttatcagttgttcaagcgacggctgatttctacgtgttactgtttgttgataagcagatccttgaacaatactctgatctgcaccagcttcaaaatgtttcatatgatccacattagatgattgaagtgtaatatcatctttttcatgtccgtgatgtttaatcgtcacaatgtgatagccttgagattttaaaaatgtaatagattgttgtaacaacgttgttttacccgaatctttaaaaccaactatttgtaaaatcataatgatagttcctcttcgaaaacattcgattcagttaaaataacatctaccgtatggccggctttaaatcctcttgtaccccctggcaacataatcattgcattactatgtgctattgctaccacagcacccgatttattaaatccggatggaaccacagtcgcacaattatgagtaaaagatgcagttgctcgaataaatcttgtaaatggattggctttcgcaaaatcttccattaatgttgctttcacaacttgagggtaaactgctttggcttgcatcatatgttgcactgctggtttaacaaataattcaaaaccagtaaaacaagccgatggattccctgataaaccaaataaatacgtcttatttgcaactgccacagttgtcacacttccaggacgcatcgcaattttattaaataacacttctgcttgaattgctttgtatatctttggtaaaaagtcataatctcctaccgaaacgcctccagtagtaatgacaatatcatgatctttcattgctttagtgatgacttgaatactactttctaagtcatcttgttgtatactataaggctctatcgttaatctcattttatcagctaacgcttgtatcatcggaccattagaatttctaatttttcctggttgtaattcttcgtctacattcaataattcgcttccagtagcaataactgcaatacttggttttaaaaatacaggcacttctgtataaccataggtcgctagtactgcaatagctccaggattaatgacttgtcctttttttaaaacgatatctcctgttttagtttcttctccttttagcgacacattttcattctcttcaaaaggttttctaatcgtaaatgtatctccattttccacagtttgttcaaacatcactactgcatctgcaccctcaggaatttgagcgcctgtcataatacgaactgcttcattttctccaactgttttatgagatactgtgcctgcaccaatatgatctatcactttaaacgttttacgattttttgaaaagacaccagccgaatcttcacttcttatagcaaaaccatcatacggcgatttattgaaacgtggtatatcataagttgctacaatgtcttctgctaagacatatcctaaactgtcctctaatgatatattattttgttgagtatatatatcttgttttacaatacgttcaattgcttctttaataggtattggttttcttttttcaactaccattttatcaactccaattacacgataaattcatgctatactattttataaactcagtaagataatgatgtactcattaaaaataaatgtttataactttatttatatgttatgattttttagatatttctataggaggctatttatgtcaaattttacacatatcaatcatcaaggtaatgcaaaaatggttgatgtttctaataaaagtattacaaaacgtatcgctaaagcgcattcaagcatcacagtgaatgagacgatttaccgtcaaattatagacaatacaaataaaaagggtaatgtacttaatactgctcaaattgcaggtataatggctgctaaaaatacatcgactattattcctatgtgtcatccattgcccttaactggaatagatattgaattctcttggaatcaagcaaacacaccacgccactatcaattaagcattactgctacggtttctactacaggtaagactggtgttgaaatggaagctttaacagctgcttcagttacagctctcacagtatatgatatgacaaaagcagctgataaaggaatgatcattggtgacacataccttgaatcaaaatctggaggtaaatctggagattatcaccgtcaattagattaatctttatgattttcttctattatgatagtcataagcagcattttcaattagggaaacctatgatttacaatgctttttatgactattttatttatggagttcataaaccatatgatttaattccggaataatgagtttagtcattgctaactttactgccccagttgatcccggcaacgtaaagattaatttactcataactgttcccgctaatgctcttgagagaagcgcttttgttcctacatcttccgtataacttaaatatctaaaaagttcgccgaatccttcaatttctttatctaaaagtggttttacagcttctatagtcacatcacgttgtgctataccagtgcctccagtcgttataatgacatcaatatctgatgctaaccattcgtcaatttgagattggatgtcttccttgtcatctttaatgatatgatagtgttcttctgtcacttctatattcagttctttcaaacacttttgaactaattgaccgcctttatctgtttctttatttcgtgtatcagaaattgttaacactgcacattgaattgtttttttaacttctttgttatcatgctgatgcatcatcattctctccttatccaaatagttgattgattaaatgtattgcttcagatttcttagttgtaccatgaatcaacattcgcccaccctcaaaatatacaattctatgttttttaaattcaaatactaacatatattggttttcatggtaacgaatatcgagtgctgtaagaaaatcaactaatactttttttgtaatgtctttattttcatattgaactgtatctctaccacacaaagttgcatatgaagtcgaatgagcatataaatatggaaagctagcattcttaccacaagttgggcaatcatcacgacgcattttactataaccaaaagaacaatgtgtattctcccaaatatctccatatgtcagctttgtgggaatctgtttaccaatcaatatctttaaagcatcccgtaattgaaaacttgtggtcatcgttacggctggctgaatcacaccgacagtatcacatgtcagatttataactggtaactgaggcattaaacaattaaagcaaggggtttgacctggaataaatgcagtttctacataggtactttgaactactccaccataaatccaaggaatgcgatatctataggaaaaatcattgattaattgtcttgtttcaaaattatccgttgcatcaataatcaaatctacactcgttgcatattgctctaaaaattgagcatctacatgttcaatataaatattcatttttatatcagaacgaatatgttttaagtgatcttgtgcagcaaccacttttggcagcatacgatctgcatcactttctgtaaacaatgtctgtctttgtaaattactatattcaatatagtctctatccacaatagtcaactcttgaataccagcacgaacaagtccttcagctacatgggtacctaaagcgcccattccaacaatcaatacatgtttctgattaatggtttgttgtccatgttctccaatatctttaaataaaatttgtcttgaataacgttcttgagtcattatttgaaacctctctcaacattctctcttctttttattataacgaaataggagtaggacagaaatctaaaacgttctaaacttcgatatcctactcctatttatttaatttgaataatttcatctgctaatacttctgcttcataattagagtgcgttacaaaaataataggtatacaccattcctcatgaatttgcttaactagatggatgccttcatctctagaaatatcatctaaacttgaaaaaggttcatcaagtaaaattaaattgggtttcgtgcttaaagttcgcgcgagtgctacacgttgggcttccccaccagacagtgtcggcggaaattgatttattaaatggctaatatttaaacgttgaataagctcatcaatatgtttagactgtttagtcataaatgtaatattctgaagaaccgtcatgttaggaaaaagttgataatcttgaaataaatagccaatttggcgttgttgaatctttacattaatatggttttcagtatccactaatagatgattatcaatattgatataagcctcatctggttgtcttaatcccgcaatgatatttaatattgtcgtttttccaataccggagggaccttgtattgcatatattttagcttttgtatcttcaatgttaatatgaatcaacgtttgctttaactgatgttgtaatttaacttgtaacatctagtctacctcctgaactttatcacgattcgcaaaattcaacatactaatgactgtaatagaaaatgcaacgagtacaagtacccataaccatgcctgattctcttttccttgttctactaaaaaatagatttccagtggcagagtattggttttatttggaatatatcctgcaaccatcaatgttgcaccaaattctccaatagctctcgcaaaactcatcataatacccgcaataattgagcgtttagataatggtagaattaaacgatagaagattttacgttcacttgctcccattgttcgtgcagtatttaacattttaggattaatacttcgaaatccttgaatagtatgttggtacatcagtggaaaactaacaatgacagatgcaattactgcacctgtcattgtaaatactacgggtaagtgaagtacattttgaaagaattggcccacaaatgttctaggtgaaaaaacaataataagtataaaccctagtactgtcggtggtaaaacaataggtaataatattaagctttcaagaaattgagttgcatgcccttttcttttatataacgttctacaaataaaaattcctaatatagagacaattatcgtactgataaatcctactttaatagaaatccatagaggtgttaaatcaggcatatgtcatccccctatactttaaagtgatattcttttaaaatatctttcgcttttttagattttaaaaattctatccattctttagcaaatttgttatctgatgttgctcccgcttcataagtgataggttttttcaaatccgcttttttaatctcatttactttatctgttctttcattattcgtatataaatcggtctcatatacaaatcccatttgagtattacctttttcaacgtaatttaatacttgtttaacgtctttggcatatacaattttatcttttacatcactatataaatgttgattatctaaatattgtttcgcatatttacctgctggtacagttttcacttcaccaatagctaatttttcgttgtcttttaaatcttttactgaagcttgatcactgtttttatcaccaatcaatactaactgattatgtgcgtatttatatgtattatgagcttgattatgttttttcaacatatctacatctttcgtatttgcagacataaagacatcagttggcgcacctttttcaatttgttgtcttaatgcccctgatccaccataattaaatgttacatttacatttttatgtgttttttcaaactctttctttaatgctttacttacatcacttaaacttgctgctgctgaaactttcaattcagttttaggattatcactattatttgactttgaagattgcttgctattgtcattatcttttgaatttgaacaacctgctataatgataatgaaagtccctaacaccgctaataatcgttttacagtcatttatttttatgccccctattcaatcaaatattatacgctttttatatcttttgaacagttttaccgtattttatatttatttctaaattttaaaatataaagttttatataatcattcaatattgaaatactttttgtgaatataatgatacagtataaagtagttataaccaaaggggagacattcatggataaagatgccgttcaaaatcaaccaattattaggtatgaagatgagcaactcatcgaaactgaagacagctatgtaaccgaatttccattaaccattatggtaaatggaaaagaatttgctacagtaatctgcagtccgacacatttagaagagttagtcataggatttttagcatctgaaggagccatttataaaaaagaagaaattaaacatttacaaattgatgatagtaaagggtttgctcatgtagaattaactaagtcattaagcgaccgttttgagtattctacaaagcgcatggttgcttcatgttgtggaaaaagtcgagaattttattttcaaaatgatgcagcaattgctaaaacgtctatgtctaatatcattctcactccaagacaaattttaaatatgatgacaggtttacaaagtgcaagtaccttatttaaacaaacaggtggcttgcataacgcagcaattagtgatggtgaggcattttttgaacatcgtcaagatataggtagacataatgccttagataaactttacggtttttgtcttactcatcaaattcctgttagaaataaagtacttatttttagtggacgcatatcatctgaaattttactaaaagcagctaaaatcggtgtcggtgttatattatcaaaatctgcacctaccacattggcaataacactggcacatgacttaaatattactgctattggttttattagaggtgattcttttaatatttatagtcatccagaacgtgtaaaaggagtgaattagaatttattataaattcatttttcactccctacttttatttatatcgcatcttctttgactatctgatattgaaagctttgaaaaatatagccttgctttatatacatgtcttttgctgtatcatcgccatctgccactaatatgactggtcgagaaccggctaaatggcctacataggactgcatcgtagtacctattcctttatgacgatagtcttctaaaacgccgaacccatcaatttcaacagtttcatctgtaactataacatccaaaatccccacaggtttatgaagataatatgcaactatacgagtgacgtcatctatttgatttaatattgcttctctcgttcgttcttcactttctttaacaaacgcttcgccatacggttttgaaaattcattgtaaacacttagataatcttccatattaaatgaagttacaggttcaatatctacctgaatattgctctcaaattgttttaatgtagcactgtctatcgcatacaattcaagtagttttaattgaaatccttcattgcgtatcgcttctaaccatgtagaatgaagtaattggttttctggaaatgtaaaagataaatgagaagaatgttgttttttatgcaaaattcgttgtttctccatatctgcataccactgattaattgaaggtaacgttttgtactgccacttattcatgtgatatgtaattggatcagaaggtgttaaatatataatattcaactcattttctaagtatatttttccattttctttaatctgcttcattgttatgtgtgttatagcaaccatcaccttactatgtatattttgtactattatatcaaattcttaaaacgtgaatggttaagtaatgttgtaccaattaagcttgcaataatcgctttaatgatatctcctggaacaaatgtaaatgacaataagaatgctttacttataggcatatgtataatgaatcccataatgattgttcctacaatatctaataataaaacaccaaatacaagcataccaataaataatgtaaagaaattaatatgatttttaaaacgatctcttactaaacctataagatatgccactactggatataagaataaaaatcctgctgaaggacctgcaaacacacctattccaccacgtccacctgataataatggcaaacctgtggctgctaataataagaagataataacactgagtgcgccgtatttacgtcctaatataactcctgctaaaaagacacctatattttgtaatacaattggtacgggcataaatggtaacggtattccgggtactaggcctaaaatacaaataaccgctgtcattaacgctgtatatactaaattttttgtactcatttgatttcctccttttatgaagaaaattataccacttatgtaaactgttttatataaaaagtttacatttgaagttaatgagatacttttttagctaaaaacgtgatatagttgaagaattcgtcatgattgacatgattaacgacacgcactatacgtccatcatcactcttatatgtacgtccttgacttggtccttttgtatatacatctactttaagttctatagaatctgttaagctttctttaccaatttgagcagtcgtcaatacatcccataaaaaataagtagagtttgtgacaaaatgagtaagaggaggtacagctgcataactgattcctaaaaaatcaactcctataaactgacgttgatttgcccacatttgacgaatagctggcgtcaatggtacttgattagtgctttctaacgctaccatttctatcttgatagacgtatcaaatattgttttaacagcttcaggatcccaaaaagcattccattcagctgtgccatcatgttcgggttcttctacatttcccttttctaaaaatgttcctcccatccaaactaacttttcaatattgtttactattgctttatcatgtttgattgctttggctaaatcggttaacggaccagtaaacaataaagtcaccttttctttactattatttaatacattaataatatcctcataagcttcaaatgtactcgttacagaacgtttatcaatccatttctcatttaaaataggaagcgcatccataaaaaaggcatgcattctccagtctttcggaaaagggttaactcctctttcatatgaaggagctacatcaatagataaatttgaaaaacgatttataattttacatgaagcacttagagaaggttctaaataacaatctgcaccgattgtacttacacctactaattcaacattatccatttgtagtaataagaatagtgatattaaatcatcaacgccgccatcatgattaaaatatattttagtcattaaatccctccaaaaatatgtaaaaaagctatgactacattatacgtaatcatagctttctttaaacatattataaataaaaaattcattctacattaaatcaagtatagattttgcaatattcgtatatgctgcatcttccataggaggattatgtaggcccgcacgcatattacgataatagcgttgtaatggacgatccatttctaaacttttcgcccctactattcgcatagcaagatccactacttctaatccttgattcatgactaaaattttacttgcagatgtttcattccaaatattaagtgtttcattatattgattgtaacctctagctgtactccataaaaaatgacgagcagataataagagtgattccattttcccaacattttgttgtacagtaggtagcgtagcaattgtgccttcaatactattaggggaatgcgttttggcaaactcaatagcataatctctcgctgcttgggcaatacctaaatatacacttggtatatgtaaaatccatccattgggttgcggtttatgtttcgtttctacaaagttttcaaatggaactataacatcatttaatactaaatcatgactttccgttgcacgcatccctaacatattccaattatctgcaatttctaaacctttactctccctagaaattaaaaagaagcctacttcttgaatatcttctacaaatgcagcaacaatataatgtgtcaatgctttactcatagaagtaaatgttttcacaccatttaatttatatccgtctttagtttttattgcatgcgtagcaggtcttccaccacgagtaggactaccagtatccgcttcacttactgctctatttacaagtgcgccattttttacttcttttgcaaattgatcaagcatagtttgactccacatatgctgttgatataattgccctacaacgcttagatgccagcctatagatagtgctgtagcgccatctatggctccaagatacgattgtaaaacgaccatatcttctatggttgcaccttctccaccatatgatttaggtaaagttaacacactataaccttcctctacaagccattttatattgtcaaatgggaatttagagtcaatatcttcttttgctgctctttgtttaaatgtatcttcaattgttttaaatttttcaatccattttctttgaatatcactacttattaaaaatgaatctaacatgactatcacctattcgatatttgatatatttaatcatagtttaacactcggttttaataatataaagcatctcattcacatagtataatagaattaaaaaagagtggacagacattctgtctcactcatttaccccatcatcattctattgtatatatttctctaattcagcaattaaagcattaattctcccgcgttgctcttttgttacataaacaataactgttctttcatcttgtatactacgtttttttgataataattgtaaatcttttaatttttgtaatgctttagttaagtaataaggtttgaattctgaatacgttgcaatttcttttgaagtaatttcatcttttttacttttaacaatataatttaaaatataaatttcttcataattcagattatattttttcttaatgtctttaaaaaactttttcacttgaaatgttgcgttaactaaatcattgatgtctttaatttgtcccatattctaaaccactcctctgatgtacatctagttgctacaaggttcatgtatactaactactacaacactaaacatttcttatgctataaaaattattttataacatttaagtataatatttcaatatttttatgaaattaaaatgatattatatattaaaatctcatttgccaaattaaattatacataattatttcatgcgttatacacctaaaataactagtaatgtatgagaataagcctttcttacatcactagttatttttattttttgaaacaaattataatgttaattccttttttatcattttactacaatgactcaagatatcatgaatttctttcttttttgacatatttaactttatacatactctacgttcatctagatcatctctttttttcaaaatataaccactttgttgtaatcgtttaattactaaatttatatttatagactgacaacgcgaaaaatagtttatcgatttcaacgagatatcattttgattcaaccaaataatgcctaaaacaagcaaatcatttaaacttaactgatagtgcttaatatttttttcaatcttacttaaaactttataaatagtaattagatatgttaacttgcaataattcatattcttgattgatgttttaagatagttattttcaagtaattctccaatttctaataataaatgattcatttttctttcatacatttctacaggcaagattcttaatcttcgttgatcatttgcatcataagatttaaaaatccaattttcgtgatacaaatggctcacaagataaagtaaagttcgtttagataaatacgtttttttcattagtgtttcaatatccataccttgatggctcgttttatgataatcaataatagcatatagtacatttaagtgttcaatatttaggtttttagaatattttaaaagttcatcgactgctttataaaataaaagataaaataatagtacatccatatcattttttgtcatgatggttgccacctcgcaatttatacaacaattctagaagacagactttagtattgcgatacaattttaaagtgttttaagtttatctctatatcatacatatacttacttcatattaagtatgagtaaaggtctaaatactttatctttttacttattattggacttaatcctattttaggtatgatagttacttttggcctcagctataagtaactgtgcttcataatctaaagatatttcaaccgtttcggtagtcttatatattggagcaaattgtttttttcgtgcttgacctggagtcatcccatatttcttactaaataatgcaataaatctcggaaaatgattaaatccatgtttataagcaatatcttgaataaattcactgctatctaaaatatcaagtaaacataatttcaaacgaatatcattaatatattgagcaatattatgataaggtgtatgaaatttaatcacttgacttaactctttgttagacatatcaagtgaattcgctaatgcttgtttattaatcttttcatgatgatgttcaataatatattcatgaacttcatctacaagtggattgtctagtttatagttttgacgatgttttctttgaatgtaacctaattctacacataaatgtttaactaatttatcccttatgtgtggaagtcgaggttttcgactttcaaattcaagaagattaataataaatgattctaattgttttcgttcaatagaagaaaatttatatcctttttgtctgatataatcgtctgcaaatcttaaataatctgtgaatgaaatttcaattattgcaataacagagttcgtttcgccttctatcgaatataaatcatttaacataataaatacgagatctctttttttcatattatatgtatctaagtctaaatttatttttccagaaccctttaaccaatatataagtttgatattggattctttttgttttattattctcgtattttttaaaagctttaccgaaaaattatctatcatacgtctttcctctcgtttgtaatataaagactagatataagcgatgacatttctcccctttattcaccacttaattctattgaattatcgcttcgatacttgtgtatgcgtatcggagatctatcttcatatacaattttatgttttatttcggtattagcagtagcaatattttgacttattttatcactttattatcttatagtatgattttattatttttcaatataaacttactttatttatatataaagaggacatataaaatgattttttagtatttgtttaatcaaggaataattcaataggctaaattatttttctattattttacaaaaagattacaagaaaatgagtatttttttcatattcttctgtaaacactgtcatagtggctttttttatattaaaaaatattactaagaattaaatttacaaccttttatattatcgaaaaattacaaatcattaacattccccacaaactgtaatttttttgataaagtatttcttgtcgttaagtaaaatgatttaaagactaagttaacaaatgactattaaatataaaataatattaatttaattctcaggaggaaatttataatgaaaaaaatcgctacagctacaatcgctactgcaggagttgccgcaattgctatcgccggacaaggacatgaagctcatgcagctgaacaaggatataatccaaatgatcctacttcatatagctactcttacactatcgatcaacaaggtaactaccattacacttggaaaggtaactggagcccagatcgtttaaatcattctaactataattacaattataactacaatacatataataattattctaatacaaattcaacttatagttataacaactatcatactaataactcaaatcaagttgctagtaatccaacacaatcttacacaacaaataatcaacacactggtggtttaggttctgcttctacttctaataataatgtaaaagtaactactgtaactgcaccgtcatcaacaggtgtttcaatttctaactctgttagctcaggtagaaactactatacttctggccaatgtacatattatgtatatgaccgtgtaggtggtaaaatcggttcaacttggggtaacgcaaataactgggcaaatgctgcagcatctgctggttacacagtaaataaccgtccatctgcaggtgcaattatgcaatctactgctggtgcttacggtcacgtagcatatgttgaaagtgtaaatagtaatggttcaatcacagtatctgaaatgaattatggacatggtgtaggtgtagtaacatctcgtacactttcttcaagtgaagctgcttcatataatttcattcattaattaaattgataaagaaaaaagatttagaattcaatatgaattctaaatctttttttatgcatacatacaaaaagcgttcgaaactttagtgtttagaacgctttaagttatcatattaatcaaattcgttattatggattgaattctcgccacaaaaatcaaatccacttttaattcattttttaggatatctaaaatgaatgtatttttttaaataacatcgctactatgtttctcattaatactttaatcctaatttgttatttccatattgtaagggaattaaacatcgaatttatttttttacgtattccaatgccagtaaatccataaataattgctaatatagcacataaataacatggtactgcccaaataaagaattgatcaactgaaactcctaattgttgcgcatagtaaataccagatgttccccaaggaattaatggtagaaccatagtactggaatcttctaatgtacgagataaattacttctatctaaattcatatcttcaaacatgtctttcataagtaccccaaccataataataacaattgacgccacaccagcagcaaacaccaacattagggacgatagcacagtaataagaacgagggtaccgacagatttaacaccttttgcaacagtttgtaacattacatctaaacaaccagatttctctacaatacctgcaaatgcataaccacaaaaaatggtcacaatgatttgtgtcatactcatcattccaccttgttcaatcaatgtttttgcattttcggtaacatgagaatgcccagtcatagatgatgtaaaaccatcaaacgttgctttaaaaccatctacaaatttaaatccattattaaacttacctatcaaaatagcactcaacgctgaaacaagcatagatggaacagttgaaattttaaatattaaacaaatgataatcacaattaaaggaatccatacaaaaaaattaatattataaatactagatagttcatttaaaagtacttttatttgcttagtatttacattaccttgggaatttaatcctgcaaaaaaccatacgataagtccaatgattgatgctggaatggttgtccacatcattgctctaatatgagaaaaaatgtttacttttgttacaagtgcagcaagattggttgtatctgataaaggtgacattttatctccaaatactgcacctgcaataattgcacctgctgccattccttgatttataccaagttgacttccaatagatattaaggcaatcccagctgtagacgcagacccccaagctgttccggttgctaaactacatatagccgaaatgataaatgctgaaattagaaaataactaggattcaaaaacttaagtccatagtagattaatgcaggtacagtacctgcgtacatccagctacctacaataatacctacagccaaaataatgaaaatagcaggcatagctgttgtcaatcgatgtgtaattccttcttccaaatccttccattttaaaccaacacgcatagcaataaaagcagcgtaggttgaggcgataagtaacaatacttgaatagggatattgaatttaataaatccaattgtaacaactattaccatgacaataattgtagatattgcttctagaaatgtgggttttcttttcatatatctgctcctttttcttttttcttaagacctcttttctataccaaacattatacttattttaatcctaatttatctaaaccaagttcttctactgttagcccttcattaaagaaatcacgttcgagaatagtcgaggcaatcgtaattatcgcatcaatattcggtgtatctacaccaatttcacgtcctaaacttgaccataatacaagtccatatgcgatatcttcagtaagataacgattttctacagagttcggtcctggaatttgtgaaaatacaggacttgtattaaataaacgatttagcggttcatcctcgtctttacgttctagataacctcgttgaatacgcgcttctttagcagttaataattcaaaacctaatttacgccctaaagttagacgttctaattctacagcatgtaaaagtcgcactgtgtgttttgtgataccttctttatataatgcaaatgtatctgcataatctatacgacctacatttaatagtgtaggagctggatgaacttcaggatttccattttctagattcgttttccacaaactttcttcttttactaattgtggatacaattggctcactttatcaaaacattcatttaactctctcttattgtacgttgagaaaaagacttttcttacattaagagataaatccactcgagcctcttcaaaatctacacgtgttccgtaagtaagggtattagcttctgcatatttaggttgaatattaatatgacgttcctctaatacattcataaatcgaattgatcccatagctgctgcgatattaaagaaaataatttgttccgccgttatataatgagacatcacttttgcataatattcaatgtaagatgaaggaatcactacttgtatcacttctgcatcttttaatacatattcaatatcatcactaatatttgtaaaaggtacaaacgtttcatgaccttcattattaaaatcaaatccacctttttctaacgctctatcaaatttgtgaattgatgaatttcgacaatataatttgacttcatgtccttgattgaccatatctactgcagctgtaaccgcaccatttcctgatcctactattgcaattttcatagttatcattcctcatttctctatttagaatttttaatagtcatctaaaaaaattattatcaataaataaagatgcagatataaatactgcatcttcaaaatagtattattttattctatagcctaatttaaatttttacaaacactattagtagtatgatatcacataaatctccataaatgtaaccgcttatcctttaagtatatacctatatatataataagtttattacaaggtgctgtaatataaattctattaatattttcaaaaaaattagaaaatgtatagcaaacatgcagtttgcaagaaatatttcattaagaaatattaaacagatttttattacatagttgtacaagaattttgaatttcatttacggtaaagtaacaatgccctactacatgtttttatctgataaagtatgacttgtcgttaacagcgacaagttaatgttaaaacatattcaacatatcgctaaaattatcctattgttgaatagtatttgggaggactttatttatgaaaaaattaattacattatcaacactgacagcaggaattggagtctctgcttttggattaaatatacatcatgcagatgcagcagaattaactcaaaatcaagctactcaacaagtgaaccaacaaaaacaacataataatggtgaacaacaacaaaatttaaatcaccaacaaaatcagaatcaacttcaaaagcaagactataatcatcaacaaacaagtcaatctaatatagcacatcaagcacgtcaaattaatcattcaactctaaataatcaaagatatcattttggtcaatcaaactacaacgcacaaaaccaacctactcaacatttgaatcaccaaaagcaaaatcataacgtaattcactataatcaagcaaaatctaaaaaaatcgtcactaacaagcaaacaccttctcatttcactaatactgtttactcaaacaatcatacaaattctaatctatatttagccagtcatactacagaagatgtaactagcgccacatctacaatgaataaattaaatagtgtatctcatactacgtcatctagtagttcatctactgcaaattcctcaagtgtaacgagtacataaactaagacaacatcttcaactaagaacaacttgtataccgctggtcaatgtacatggtatgtatatgacaaagtgaatggtgctattggttcaacatggggtaacgcaaataactgggcaaatgctgcaaaagcagctggatacacagttaatcatcatgctgaagcaggttcaattttacaaaccacagcaggaagtttaggacatgtggcttatgtagaaagtgtaaatagtgatggatcaattacaatttcagaaatgaattacacaggtggcgcatacgtgactgatacacgtacaatttcagcaagcgaagtaagtgcttataattatattcatttatcgtaaatatctaagattgatataacttgaatataaatatattaccgtttaagataacctttaagattatattttcattaatttaaaagtgagaaaatgaattcataatgaattctttctcacttttttattttctaaaattgcataactcataattgtttgagaaaatatttttacttatcaaaaatattataaggagtaatggatataatgcaatggttaaaggtcattttatctggattgatagaagttgtttgggttacgtgtttaaattacgctcataatacgtttacttggctcatcactttattatttattgctttaagtttttatttaatgctttctgcgacaaaacaacttccagtaggtactgtttatgctgtctttgttggtataggcgctgcaggaacagttatcgttgatatgttatttattaatcacgtcatttcacttatgaaattattatttattattttattaattataggtattatcggattaaagctttctactgatgaccaatctgaaggaggtctataaaatggcgtggttataccttttagttgcaggatgctttgagattttaggtgttgttttcttaaatgaactgaatcgtacacataaaaaaatatatattctactaggtgcgcttacttttatatttagttttagtactttaaaactatctatgcagacgatttcgatgggaactgcctatgcaatatggacagggatcgggactgctggaggtaccattgtaggtatgattttctataatgaatcaaaaaaatttattcgtatattttgtattggtttaatcttaatatccgtaattgctttaaaaataatacagtaactttattcatataaattctttgtgtccctatctttcttccattatacttaatttgaaagaatacaaaggagtgagatggatggaaaaagtatatatagctggtaaaattccagaagctggtttaaatctactcaaagaacattttgaagtagacatgtatgaaggtgaaggtatcatcgataaagaaacattaaaaaaaggtgtcaaagatgcttctgctttaattagtattttatccactaatgtagataaagaagtaattgacagtggtgaaaatcttaaaattattgccaattatggcgctggatttaataatgtagatgtagattatgcacgtgaaaaaaacattgatgttacaaatacaccaaaagcatctacagctgcaactgctgaattaacattcggcttagtattagcaattgctcgtcgtattgttgaaggtgacaaactttctcgtacaaaaggatttgatggttgggcgccattattctttagaggccgtgaagtctcaggcaaaacacttggtattatcggatttggagaaattggtagtgcagtagctaaacgtgcaaaaggatttgatatggatatcctttatacaggtcctcaccaaaaaaaggaaaaagaacgtgaaattggtgctaaatacgttgatttagatacattattagaacactctgattttattacaatcaatgctgcttacaatccagatatacaccacatgattgattcagaacaatttaaaaaaatgaaatctactgcttatttagtcaatgcagggcgtggaccaatcgttaatgaacaagcacttgttgatgcattgaagcataaagatattgaaggtgcagctctcgatgtgtatgaatttgagccagatattactgaaggcttgaaatctttagataacgtagtcattacgccacacattggtaatgctacgttcgaagctcgtgaaatgatgtctaaaattgtagctaatgatacaattaaaaaattgaatggtgaagaaccgcaatttgttgttaataaaaaataaggttaaataaaataaggagttatcatagaatccatagtgaattctatgataactccttatttgtctttggttttatataaaaatttagtttgaccactaaaaaatcgttttggcatacgtttcatgatagcattacgcaatgcaacaactagtttattatctttttgagcgatatttccgacttttcgagaacgttttattacttttttagtatgttttacacgtaatttattatatcgctgtaatgctttttctaagtcataagaagcgatacaattagctaaaacgatagcatcttccattgcttgtcctgcgccctgacccatgtttggcgtcattgcatgggcagcatctcctaataagactgtacgacgatgtacaaatgaagttaaaggttttaaatcatataaatcgtttttaataatacctgtttcactttgtttatctaacaatgccctcacttgattaggataatgattaaaataagcctgcaaatgtggtttttcaaatgatacatatttaggatctttttcatttgcattaattgtaataaaccaataggcttgattattaattagaggcacaatgcccacgcgtccacgtcttccccaatattcatctgctgtatattgattcattatgtccgcttcatctatcattcctctaaagcatgtataaccttgataaatcactttagagtctgggaataatgcttttctaacgattgaatgaataccatccgctccaatacataaatcaaacgtctgacttgcatgttttgagaaatgaagcattggcagttcagattgaacatccactttagtcacttcataatcagtaaatacagtattaggttttacatatgaagatattaactctattaatgactgacgagataatgtcacatttaatgttccctctttcaacttagcagatgtaagcaaatcacctttatcgctatagatatttaatgattttaaattttgtccggcatttttgatacctttagctaaatcatgattaccgagtttttttaaaacgttatcaccgataccaatacctgcacctacttctttaatatcagtctttctctcaaagactttgacatcatgcccttgttcttgtaaaagtgctgcaaccgttaaacctccgataccagcacctatcactgcaactttcattctattacacctcaatatctctatttattagatatatagtaattcctacgtatcttatctttttttatacccaaacgttcataatcttttttcatattatctgcaattttatctgcccactcaatatcactcgcatattgatgagaccctggatttttaggattccatctcatttgataaagcgtaatttgttcgttttcaaaatattgatgacgaataaaagctgtaccgcccataattgctttacttggtgttgtccaattatgttctttagcataactatgaccagtagcaatggcatcttgatcaaatgcaccaattccaaaaaaattatagtatttatgattattctctttaataccattagccagttcggattgaccatttgctgtttctatgattgcatgattcattaaatatataatattcacttgatacttatcttgggcttttaaaaatgtttgagcctgatctgttaaaatacctttatttttaagtatatgttttacctcatcttcattcattggaaccgttttagatagatccatatattttaaatcattgtcttttttagaaatactcatcgctcttttcacttcattattattcgctagaacaaactgattatttttatcaatggtatttaattggttcgattgggtttgcttttgaagggcctcttgaaaactgtatcttcgatcattacgtagtatatccttatgattgatacaaagtaatacaatcaatatgatgagaacaataataaaaagtataatagataaacgtaactgattactatttctatatttcataaattgaaattcctctaattgtcttatttagataacatactgtatgcaactataatagcaataatgacgatggcaaacgaaatattaataataattttcatgcccgtacgatctcgaaataaaacattaaaaataacaagactaattgccaatgaaacggcaaacattgctatcgctaacattaatttcatcataattaaaaatataattcctaatacaacaaaaatattagaaataatagtcattattttaataatatttggatgaataagtcctctctccttacactttaatttatacactctactttatcataatagatgtatactatattttacaaattcatttctaaaaaaactcctcaacataagtcatttcgttcttatattaaggagtcgtatatattcaatttattctttagacatacctttaagtaaatttatcatgtacgttaagctacgattcatatcatcatcttttaatacactcattaagcttcgtattgtcgttttggcatttggacttgcttgattagctacgtgtaagccactattaagtttatttaaaaattgacttagttctttaacttctaaattcccaagcataaataccattggagctaaatttgtaatgagtccagtatacatatctttatttaattccgtagcgaatttatttataataacttgacgacctttaataccaccgttaatagcatctaagagttttgcatcatctaaatttttaataatacgaatagcttttaaaatactatccttattttcaacaattgcatctgtaacttcattcaaactttccaacttaagttgttcttttgatttttcaagacgattaattttagttattctttcagccatattaatccaccacatttcctgggaaaatataatccttacgtttccattttttctgaacttggacactatattgcggatgacgatgtttatctacacggaaattcgttggatttaagggagatttaccttttctagttataacctctaaacgacaatgtgtacgtttataagatggtgtgtgtgtagcataatccacgtcactattagttaatttatttatagcacctatatcgccattactcatagcatcattatttaaaggaatatatatttcttttcctttaactctatcagtaattgtagcaactaaagtagcttctcctgtatcagaaataagttttacttctgcaccctcatggatatcgcgatctttggctaattcaggtgaaatttctacaaatgcgtgaggcattttatatttaatcatttctgtttgatatgtcatatttccttcatggaaatgttctagtacgcgaccattatttacatgtaaatcatatacttcatcttctttaaagaaattatcaaatgttaattcaaataattttgcacgtttattatcgaaattaaagccatcaagatataatgtaggttgatctgtaccatctggtgctacaggccattgtaaactgttaaaaccttctaatctttcatagctaacacctgaataagacggtgttaagcgtgcaatttcgtccatgatttctgaaggatgactataattccaatcaaagcccattcttttagcaatcaattggaaaattacccagtcaggttttgagtcacctaaaggtgatagtgcttgattaatacgttggattctacgctctgtatttgtatatgtgccatctttttctaatgaaggactagctggtaacacaacatctgcatacgttgctgtaaatgttaaaaattcatcttgaactaccaaaaatccaactttttctaatgcagattgtacatagttaatatttgaatctacaattccagtatcttcaccatacaaatatagtgaatgaatttgtccttcatgaataccatccatcatttgatgattatctcgaccaggcgttggattcaatgtaacaccatactctttctcaaatttcgatctaatttcatcattgtgtatcatttgataacctggaaattggtccggcatacttcccatatcacttgcaccttgaacattattgtggccacgtaatggataagcccctgtgccaggtcttctatagttacctgttacaagaagaagatttgaaattgctgtacttgtatcactaccaatatcttgttgtgtgacacccattgcccaacaaatagctacagattctgcttttgcgcattcttccgcaaaactaattaatcgcgcttttgaaattcctgtaacctcttcagtatattctaatgaaaatggagttaatgactcataatactcatcaaaattgtcaacccactctttaataaattcaatatcatgtaaatgatgatcgataatatattttgtcacagcgctcaaccatactaagtccgtaccaggtttaggttgataaaattcatctgcacgttcagccatttcatgtttacgaatatcaaagacatgcattctttgtccaaacaatttctgtgcacgtttaattcttgaagcaataactggatgtgcttctgctgtatttgtaccaataagtaccgtcatagctgctttttccaagtcatcaatagaacctgagtccccgccatgtcctaccgttctaaataatccttttgtagcaggtgcttgacaatatctcgaacaattatcaatattatttgaaccaaatacttggcgagaaagtttttgcattaagtatgactcttcgtttgtaccttttgaagaggcgataaatgctaggtgatcgccaccatattcatttttaatgcgcttaaagttcttttctataacatcgagggcttcttcccattcaacctcatgaaattcaccatttttacgtactaaaggtttagttaaacgttgatccgaattaatgtgtccccacgagaatttgccttttacacaagtagagattttatttgctggagagtcgtgtgatggttgaacttttaagatttctctatcttttgtccatacatcaaatgaacatcctacaccacaatatgtacatactgttttatttttgttaattctttctttacgcatctctgcttcagaatccgacacagcaaataacaatccatcacctggttcagcttttttagttaaatcaatcatagctgctaatgaacccggttctgtatcagttaaatatcctgcattgccctccatattgacttccatcattgcattacatggacacactgtcgcacattgaccacatgatacacaagacgattcatttattggaacatcattatcccaaatcacacgtgggtgctcacgatcccaatctatagaaagtgtttcgttaacttccacatcttgacatgcttctacacatctaccacataggatacattggtctgggtcataacgatagaaaggaccataatctttctcataaggctttgttttatattcatatgattgttcttgtaatccccatgcatccattgcattgtgaatctcacaatcaccgttattataatcacatactgtacaatacagcatatgtttttctaaaattctatctaatgcttctttttggctagctttcactcgtttattttgagtattgactgacatcggacggtcaactactgtactacacgctcgttcaactttaccatcaatttcaaccatgcaagtatcacaggtttgaattggacccatggattcgttatagcaaattgaaggaacgaaagtatcacgagatttaataaattcaagtaaatttgttccaggttctacaaggtaatccacatcatctagggttaaaactaaatgttcttgcattgctttccccaccttatatttatattccataaacaaccaatttcattaagattctgtattatttccccatattcaatacagaattaatattattgtataactaaaatcatataatgttaaggctttcaatcatatctattgacctttctttattcttttaaataaagaatatacttttaaatttttatatctttaaataaaaaatctgagacctataaattagtctcagattttttaattgctatatattttttttattttttcaaattattatttaatacctctgtcatttgcacttttgaactttcattaggaataaaataccataatccatcattttgaatactacctgtcccttctagctgatgacgattaactgtatcattagcctctttataatgacttctaatttcatttaaatcccctaatgttaaatcagttgtgacgttcttttgaatttgagtaattaatgatggcaaatgtgtaatcgctgaagaactaaccattttatttgccatagcttgtaaaactagttgttgacgttcttgacgtccaaaatcaccacctgcacctgtttctttacgacttctaataaatgccatggctgtatctccatcaacatgagtagattgccctttagtaaatgttgtaccttgaactgtaaatgtatcattacttactatgttaacaccgcctaccgaatcaatcatgtcgtgtaatccatccatatcaatagtagcgtagtggtctattggcacattcattagtttttctaatgatttaacagccatggtaggccccccataagcgtaagcatgatttattttttcagttgtacctcttccttcgatttctgcttgagtatcacgtggaatacttacaagctcagtcgtttttttctttggattcactgataaaatcattattgtatcactacgttcaccatcatttgtgcttttacgttgtgcattagagtcaacaccaaataaggcaattgtaaatggatctccattttttaaattaacattatgagaacgcaattcagattgttgacgatgaagcgggttatgaattttattacctgttatcaatattgttgtcgcgataacggctacagtaacgacagctaacacaacaagtatactaataatccatttcattattttactagaggaacgtttttttctatcaggacgttgcatcttcctcctcctattctacttatattaaaatatatctccattattatatattaaatgatttaatttactatacaactttagtaggaaatatattaaataactaagaagagaaggattagtgtttatcattaataatagctaatatctcctcgtagcaccctttattactaataataaaggggccacctttagcgaaatcaagatgttgtccatccatctgtgtcatcactaatcctaattctctggcgaataaaaactgtgctgcgatatcccaaggtttaggattagtattaaaatgtgctccaaattgtccttttatcactcgcactgaatctaatccgcaagctcctatatatctcacactaaaagacgattgatacaaagctttacttaatttttcattcacgtattctgaaccaaatgaaacaatagtatctttaagcgataatacttctggagactcaagtttgacattattcatgaaggcccccttaccttcaattgctttatatattattttatgagcgtagtcataaatataagataatttaggttgtccattttcaaagtaagctaaaataatacaataatcttcttgttgtttcactaaattggctgttccatcaatagggtccataatccaaaggtgtccctgataaggttcaataccctcattatttttttcttcagctaataactgatgtgtaggaaaatacttttccagataggcctcgaaatcattttgtatttgtttatctacatttgtaactaaatcgaatcgattttcttttgtttctgtaaccatgtttttaattaaattaggaataataccatctaaatgttggaaccaatccgtaatatgcttatctataaattgaagttgttgtttttgcatgatgtcacctcaacgtttttattcatcttatcatataacatattattttttttaaataaaaaatcggctagtcatttgctagccgacaaaatagaaaggaaagtaagtaataaatattgaagatgtttcgatgtaacccgaacgattcaccttgagctatctgttatacagcctctacccctttgtttgaaatcgttctaccctgttacaaatactatattagcataattatctaatgattgtaagcgttttccaaataaaaatagtttattattacacttccaatcaacttattactaaaaatgtcttgaatctcagtcttatgttataattaatgtaatatgtaatgttcataggtggtgagtatattgaataaaatggaaagacaaaatcaaattatttcattaattcaacaaggacataaaatcaatgcgtctgatttagcaaaacaatttaatgtctctacccgtacaattactagagatattgatgatttagaatctaaaggagttcatatatacgctcataaaggaagacgcggtggatatgaaattcaaaatactgatcattattttcatcttaaattaaatgaatccgaacttattgcactatttttaactttgcaagaaagtcaatctcactctacattaccttacactcaagacattcattcaattatgaaccaatgtttaaaaacacctaatacacaaatgctaaaaatactgaaacatatctccaataatattaaattagaagatacacattctctaacattaccacatttgttttcagatattttaatttatagtaacgaaagacatgttatgcttgttgacttttcagaaaataatgaaattactgcagaaaatgtgatattcatcggcttactgtgccgtaacggtcaatggtttgctattgtttatgaaattggattcggtagaactcgtgaattatcaatattaaatattgttgatatttcttattcatttgaaaaaaaaattcaaacatacgatattactattcataactataaggaatttctacaacctaaaaacaatgaataaagtgagtattgaagaaattttcgtgtattctcactttcattctcaaatactaaatgcttacataccaaatatccttaacaccctcttttaaaggatgagtataccatgcattataaaaccttaatatacgatcaacacattttaattcaattattaattttactagaaaaagctaaatattattattttatggacatagcacatttatctttgggaattaaagattacaataattttattaatcattgtcgtgcgcattttaaacataatcaaataaatagtatttcatctcattgttctgattcacaaacgtattgcttcgaacaatacaatgaattgatgactcatttaaaacaaatccctcttcaaaattttaaaaatggaaatttaatcgtcgatttgcaagaacgtcaaaatcatatttataaagtttataatcaaattaataattatcaataaccttattttttcgataagtttagtaggtaaattgtcattgtaatttatagtatgtataataatgcttgattaatattaagtaaaaactgcatactgttttttaattcacgaaataatgtcatattggtgggagaatatcacattatttcggtaatcctgttacgtaaacctttacttaacttaatcactttacagttatttatcgatatttgtgggaatttagatgtaatatatgatgtattcacatgcctagatagagatgttttcattttcatctatctatttatgatgaaagaaaaacttttaataaattaggtgattggatgacaaatattttaagtaggatagatgaagtctacgcttcgtcttctaaaagtgaacagaaactttcacgtttcatattaaattctccacataaattagtttcaatgtctaatgaagcgattgcagatgagcttaatattagtgtgtctactatgaatcgttatagtcaaaaattaattaatcaaaattttaaagctatacgcgatgaaattaagcaatggtttcctaaacaagtcacaccgtataatatcaagttagtagaaaatgaatcagtagaaagcttaaaacaaaaattatattttcaaactaaagcgtcgttaaaacaaagtaatcattttatagatcaccaaactattgacgctatttgcgaaacatttaaacaggcacataccatttttctatatggttatgggagttcatacgtgtgtgcgcttgaattttatcagaaattatcccgtattggtctcaatattcaattagttcaagatacacatttactaactacaatgttgtctacacataataaaaatgattgtgtcgtttttattacccatagtggtgaacagagcgaactacaagcaatggtaaaagtcgttaaagattttaacctttcaatgattacaattacaagttctaacaataattcaattgcaaaagattctgatttagttttaacgtataatgaagattataaaaacgaactgtgtatgagtgcgacaactgcattatttgcacaattatatacgattgatattatattttaccgctttatagcacgtaattatcacgcttctttagactatatgacacagtcaaagatttcattagataattaccacaagtatttatcaaaaattgaatttaaacattaataaaaaaggagtgggataaaactcattgttccacttcattcccaacttatgttgggcgtcgacgttctttttgaatgactttatgttggggtctcggtctacaattaaaaaaacttgatattagtctatgtttaatttagggatttactatccaaacgttaaaaaatctgagacgtttatgcacgtctcagattttttattatatatttttatcgttattttactctttttatagcatcatttttgtgatgaccgcgaataaagtaatacactgtaacccctgctaagacaataatacctataaccactgaaataactgtgtctttattaaataacataccaattaaaacaatgagtaaaaagataattgtcataacactagaaattgtgcctcctggcattttaaatggatgattttcaacctgttctggatgtaattttctgaaacgaatatgactgattaaaatcataaaccatggaatcatacctggtaaaatagatgcactataaacatacacgaaaatactatcagcgccttttataaataaaggtaaaataacatttaataatgctccaattaaaataccaattgcaatagttaatacaggataaaatggcacaccatttttcattacacgtgtaaagattttaggcatttgccctttttgagcaagtgtatatatcatacgacttgcactaaaaataccagagttacatcctgataatgcagcagttaatacaacaaagttgattaaacctgcggcaaatgtaataccaattttagagaatgtagctacaaaaggactaccaatactttctaattgattccaagggtatattgaaacaataacaaaaatagcacctatgtaaaaaattaatatacgccatataacaccatttacagcacttttaatattcttttgaggattctttgtttcacctgcagtaataccaattagctcaaccccttgataagaaccaataacgattgaaagtgcaaagaagaaaccaactaatccatttggcataaatccaccatgtttccataagttagaaataccgatagggtgtcctccattaccaattccaaagaaaatcaatcctaatccagcaataatcattaatacaattgttaccacttttatcattgcaaaccaaaactcaaattctccaaacgctttaactgaagctaagtttgctattaataataatactactgcaatcacgcctggtatccattgtggtaaatgagggaaccaataattcatatactcacctacggcaatgacttcactcatcccaacgacaatccattggaatatattactccacgctgtcatatagccagcagctggatgtatgtattcactagcaaatgttgcaaatgaacctgttgttggatttaaataaatcatttctcccattgctctcattattaaaaataagaatatccctgcgattaaatacgcaaaaataactgatggtccagtccatttaattgtacttgttgcccccataaataaacctacaccgattgtcccacccagcgcaatcattctaatttgacgtgcactcagtcccctatgtaattcattattatccataaaaataccccatctctatttggactaaggtgcgatacttttaacctttagaaaatatttattacgttttcttagtcgacatatcctttaccttattgaagttattatactataattttcagaaaataaaatatattttttaaattctgtcgaaagcggtttcgtcaatttacttaaatttttttactttttgcaaaaatgaataatctaatatttgtgttattgggttatttttagttgagaatcatattactaaattaatatatttaattgatactttagcagtatgctatactgcttatatagacttaaaggagtttaaccttatgcagcatgtattaaaaaaggatatgaaggtatctattatttttgctattgtgttctttttactgaacttttttagtgaacaacaacacatggtaagtttgcttatactacgaacgcttttagcaactttagtatttttcttactatacttaattgtattttcaatctttaattctgatcaacgtaaaataaaatttagtattactttatctatcgctgttataatctttttaattataggaacattattatcttctccaaagttcggtgttttaacaggaatctgtgtaggtattattgcaggatttatatgggaatggattgaaaaaagaaaaggagaataaatatatgtcagtcactattggtataatattaattattgttttattatttttaagtctcataccaaattataatgcaatgaaacaagctaaatctcaaggatctaaaagcactagatttaccgtaatggtaggtattgatgcgattttaattgttttattagtctttacaattattctaaaaataattatttaataaaaaaggaaccttagaaaaaggttccttttttactgttatattggtcagtcactttataatttgccttgtaacaaaaagaaatacgctataaaagcaagtataagatatatcattgatcctaacatgaatgaacgtatacgaactctaaaaggaatacgtttattaaatattggacctaaaacaagatttcctattccgataataatgggtccagctaaaaagaagatgattaattgcgacgacatgtcattcacacatgacccttttcaaaaaaacgatttataatttcttcgccatttaaatctttaccaatatatggaatagttgagaaatcttgtttttgagtcatatcatttgtatttactataacatctaatccagcgcgaaaagcagctgtagcaccatttacagagtcttcaatagctaaacaatgagttggagaataattaagttgctgaacagcagtcaaataaagttctggctctggttttacatattctacactttctctcccaacaataatatttatatattcatctaaacctaaactcttaaatactggaaaaatatcctttttataactacttgtcgcaattgccataggaatatgacgttgcttcaagtatttcattaattgtttaatcgtaggattaatttctaattgattacttgtttgatgatgttctttataaataatttctttattatcttttccaatcgtctgttccaaatattcgtgtaaatcctttgcttctccaccaatattttcacggtaaaaatcgagtgtaattggtgttgcattatgactaattaaatgcttattaataatattaaataaatgttgttcagtatcgacaattgtaccatcaaaatcgaatactattgctttatacatgatatttctcctttaaacttaatattataggtaagtttaacatattacattaacgtttagaccaatatttggcaagaataggtccagaaatattatgaacaaaactgaatacagctcctggcactgctgctagtggactaaaatgtacagttgccaaagacacagctaaacctgaattttgcattccaacttcaatagaaacggcctttttgtctcttctatcaagtttgaatacatgcgctaaaacataacctaataaatagcccactacattatgtaaaatgactacaataaaaataaggaatccagttttaagaatttgtgatttactccctccaacaacagccgctaaaatcaatgaaatcgctactacagaaataattggtaaaattttagtagcttcccgagttacttttttggaagcaagttgtaaaaggaatcctatgattattggtaataaaacaacttgaatgaccgaccataacatacttaaaaatgatacatgtaaccactcatgagcaaataaataaattaaagccggtgttacaaatggtgctaataaagtagatacacttgtaatcgctacagataacgcgacattagcattagctagataactcatgacattacttgatgttccgccaggacaacatccaactaaaatcactccaattgctaactcagctggtaaattaaatattttagcaatagtataggccaaggtaggcataatagtgaattgtaagatcactccgataataacagacctcggctctttaaaaactaatttaaagtcactaggtttaattgtcattcccatgcctaacatcacaattcctaatagccatgggacgaattgacccatcgtcgctagttgagttggaaatataaaacctataatagcagcaataaacatccataataaaaatgtcttagttgcaaattcacttactttacttaacatgatgtcaccctcttattttaaataatgaaataagagtatcacaggagaaaaagtaaaacaatgaattttcagaatatttaaaatatatatgtctttattttttcttttttaaatagagttacgaatatattacaaaaatattaaattaaaattcattcaaaagtcgtagtgataatcataataaagagtgatacaatcagactgtatatgggaacgatgtgtttcattttaagaatgataatgacatgaagactacatattattaagaattgggaggttcttgcatgtggatagataaatttgaaacttacattctaaatattgtaggtttgcaatcaagatcgactaaaagacaattaatgaaaatttgcagaaatgttcaattttgcgaatcatttcaatacaacattattaaatataacaatactccagcccttgaaatcagcttgcctaaacaacaattaccctatttcattagttttttaagtttttaccaaatttctatttaccaaattctttcttctagaaatacacacatcttattggattctggacaatattattcttcttctaaacgctttaatttatgtatagatggattacaagatgcttttattaaagataaagttattgatataatgacatatttctctaatcaatatgatttaacttatacattaaacaataattatgctagcgtatgttgtaaaccagaaatattctcgaaactcattcagtttattgcttgtcgaaatattgatattttatcagccacatataaagctcgcgcattacataatgcacgtatttcttagaatagttaaagggtcgaaacaaaatgtttcgacccttttagtatcttattttttgtcattttcatcaaatactaagtgttcaaatgcttctcgtacttgtggtacggtcatccctacaactacttgtacattcttaccactttttacaagtccatgtgacatttgttgatgtgtaaaatatgcagtatcttctacttttgattcgtcattaacagttaagcgtaaacgtgttgtacaatttgtcacatctttaatattttcttttccacctaaaccttctaaataataatatgctttttcttcatattcattactaggctcaaaacctgaagtgtctgtactatcttcaccttttttctctttataatcttttttagaaaatagtttcacttcttcttcagcacgacgtcctggtaatggaatatcaaattttaaaataagatatctaaatacaaagaagtaaattgctgagaaaattaaaccaataataacttgagctacataagtcatccagtgattttgtccaagtggaatccagtttgttgcaataaagtcaagtagtcctccacccatattaccaactactccaaaaccatacatgattgtatccattgttgcagctaataatgcatgaataacaaataagaatggtgcaataaataaaaatgtaaattctaatggttctgtaataccaactacaacagcagttaatgtagcaggtatcaataatgcagctacttttttacgattttctttaggtgttgtagaatacattgctaaagcaataccaattgcgccaaatactttaccattaccttgaagcatgaaaccataatggaattgatcttttaatggtttgctactttcggcaaattgatttaaatgtctaaaccattctgcttttaaaccatcttttgctacaactggacctacttcaattggtgcataaacaaaatggtgaagtccagtaggtattaatacacgttctaagaaatggtataaccatacgcctatataaccagaagcaataatgaagtgttgtaatgattcaattccgctttgaatcgttggccacactacacatgtaatggctgctacaggtaacataacaaagaatgaaatagtgactacaaatgttaaaccttggaaaacaccaagcatttcaggtaatttcttactgtaatatctattatgtatccaagttacaatagctgaaataatgataccacctaaaatattagtatctaatgttggaatacctgcaattgcttttaaacctgtaacattttcaacacctttttgtaagtttgcaccaaacgtatgtggccattgcgttaaaatggtattgataaatgtattaaacattaagtaacccattaaagctgctaatgctgcgtgacctggtgcttttttagcaagtgaaattggtaaacctactacaaatacaatttccatgtgattaaagataacccaaccaccagattcaatgactgaccaaaatttaaaccaaaatgtgtgactgtctgccaaaccacccattattgttgggtttttaaatagtgttgcaaaccccaatataatcccgaagaatgcaaacattaatactggaactatcattgcgctcccaaaacgttttattgcgttcatatgctgacccccaaatctaaatatcatagttaatcatatgatattgcacttttttaagcgctttcttaatatcttaattctattatagtaaacgctttcatatatacaatgatattgactcattttgaaatatttttgtataatcagtttatattttctatagatgaaaaaattttcaatattataacttgaggtgtttatatgttattagatgagagagttaatactaactttgataaattaaatgacaatgatcttcatatagctcattttgttaatacacatatagaacaatgtaaaactttaaaaatacaagaactatcacaatatacacatgcatcaaacgcaactattcatcgtttcacacgtaaattaggctttgatggctatagtgattttaaatcttatttaaaatttgaaagtcaatctttacatgaagttcctaccgattcaatcaaacaatttaaacaagaaattgaaacaacatttacttacctagaaagggtaaattttaaccttattactgaaaaaattgataaagctaccaatgtatacttatatggtactggacgagctcagaaaaatgtagctgaagaagcacaacgtatcttattaactatgcataaaaatgtaattgtattgcatgatgaacatgagattaaaatggtacttaactactctaatgaagatgacttattttttgtgatttctttatctggagaaactcaccaattaactgagattactaatttacttcaattgcgccaacgttattttatttctgttacaaccatgaaagacaatacattagcacaaaaggcaaattataatgtttacgtttctagccatacattttatttatacaatgatatagattattctagctttattaattatcatatcttttttgaaacgctactaagaaaatataatgagcgaaaagaaaacggtgaattacaataaataaaaagacctattaagtaataactgacttttactcaataggtcttttcattttaattaaagtaacatatcattgtcctctacatattgatctaaaacttcattcattcgatcaaacattaattctaaaccatgtgcagtagaatcatgatattctttctttttatgtttatattctaaagccgttaaacgacgttctttttctactatagattgatagtaaaagaacatttgcgtaccgcctgattcacgctcttcaaattctacttcaataacatcttgactatcgcttaattctggcattccaatagtcattttgatgtattcatcggatactaattcttcatatttaccttgaattacattttgtttaccattacgagcatctactattcgatattgtccaccttcatgaatatctgcatcaaataatttatttgttcgttgggaggtcataaaccattgctttaataagtttatatctgtccaagcactataaaccaattctggagaatatttaaataaacgctcaatatgaatctcaacttgttcattttctacattatattttgccactcatctcacctactttcactcttagttatattttaacgcatttataaatactaccaaaatttcaactatcagaaattaaaaaaaatataaatttagatgattttaacttgttatatatcatttatttcgtcttaagacgtggaaatctaaatacaattgctagaattccacaaatgcctaataaaattgaataaatacaatatggcaacatactaaaaggagatattccagcgacacccgctgctgcaataagttgagggctatagggtaacagaccttgaaaacatccagcaaaaatatcaagaagacttgctgatttacgaggatctacttcatactcgtcggcaatatttttagccaatggtcctgacataataattgaaattgtgttatttgctgtagcgatatccgctacactcacaagactagcgataccaaattcagcaccacgtttcgatttcactttcgatttcacaaaattaagcaaccattctacaccgccattatgttgaataagaccaacaagcccaccaataagtaaagctataattgcaatatcttccattccaataattccttttgatatagcagttaataaacctttccaattgaaagaaccatcaataagaccaatgattccagaaagtatagtaccactaattaaaactacgataacattcacaccaatgacggctaaaacaagcactaaaatataaggaatgactttcactaagttataatcatattgcttagaatgatcaatatgtacaccatttgttaagaaaaataaaatgataattgttagaattgcacctggtaaaacaatccaaaaattaactttaaacttatcgctcatttttgttttttgagtacgtactgctgctattgtggtatctgatatcattgataaattatcaccaaacatcgcaccgcctactactgttcccatcgctaacatagctgaaatatcagttgcctgagaaaatccaaatcctacaggtgcaagtgctgcgatagttccaactgaggttcccatagagatagagacaaacatacaaattataaacaatcctacaataataaaattttgtggtatgagtgatagtcctaaattaactgtagacgtaacaccacccattttttcagcagtagttgaaaatgcacctgctaagataaagatgaaaaccattaggacaatatttgaatgccctgctccttgggtaaatatttcaatcttttttgaaaatttttcttttctattcatcattaatgctacaatcacagtaatcgttatcgcaacatttaaaggcatattactaaaatctccagtagcgattcctattcctaaaaataatgcaataaatagcacaagaggtagtagtgcccatgcatgccctttattcccttcttccatatttaacctactttccttaatactaattgaatttatatttaaaggtacaagattcatatatcatcgtcaatacaattacatgtaaaattcatattattatgattctggacgtttaattgtaaatgtgtctccgagtttagaataattatttcccgctaaacgtgctacgggtttaagttgattaaaatcaattttactatcctcaaaatagacatcttcatttatatgatacataacaacttctcctataattaaatccgcaccatcatttttagtacctaattgaatcatttgatctaatttacattcaaaacgaatattagcttctttcacagcaggcgtctgtataatagatgaactgataagagtcaatgatgtgcgttctaattcattgtcttcgtattttaaaggtgcagccgtctcattgatatcttcaatattgaattcatctgtaatatgcacaacaaattcttttgttttttcaatatttatagcagtatctttacgcttaccattacttctttgtgctgcaattgctatcataggtggcttattattcactacattgaaaaagctaaatggtgcaccgtttaaattacctttttcatcttccgatgttacaaacgcaataggtctaggtataactgaaccacttaataatttataattttgaatatctgataattgatttggattaatccctttcatttttaattctcctttataaaataaaaagcgagagatttctaaaaatctctcgccagtatacttaacgtttaactaaattagtcgatttgaataccaccagtaacgctatgaacttgaccagttaaataactaccatcttctgaagcaaataatacatatggtcccacacattcaacaggttgacctgcacgacctagtggagtagcttggccaaattctggtattgctgattgaggttgtccaccactgatttgtaaaggtgaccaaaatggtcctggcgctacactattcactctaatacctttatctccaaattcttcagaaagactttttgttaatgaaataattgctgctttagaagcggcataatcatgtaaaattgcagcaggtttatacccttgcactgaagatgtcgttgtaattgaagcacctggttttaaatatttagttgctgcttgagcagtccaaaaaattggatacacatttgtttcaaatgtttcagcaaattgttcagtcgtaaatccatgaatatcatcatgatactgttgatgacctgcaacaagagtaatgttgtctaagccacctaattcattataagcttgttttactaaatcatagttaaactgctcatttctcacatctccagggataagcactgcttttcttccagctttttcgatgacttctttaacttcttgtgcatcttgttcttcacttggtaagtagttaagagctacatcagcgccttctttagcataagcaattgctgctgcacgtccaataccagaatcgccaccagttactagcattttataatcttgtaaacggccatgaccttcatatgattcttcaccacaatctggtttaggtgacattttatattgataacctggtgtttcttgttcttgttttttataatcagaatctttaaatttagttcttggatcttgtgcacccattaaaatcatctcctatttaatcactcaatacagctttaccacattaaatagtaattaaatcataattccaaaaattttctaataaatattatgctaataattgataaatcagttctataaaataatcaggtgttttttctaaaatacgttcatctggattgtattttggatgatgtaaatcatattcgctattcgatccaataaatgcaaatatccctggatgatgctctaataaaccagaaaaatcttctccaattgtatacggatgttctaaatcaattactgtgtatcctactttttttgccgcttctttagcatgttttgtaagctctacgtcattaataactgcgcctggtaaacgtgtataaattaattcaatctctatattaaataattgttctaatcctttagcaatatcatgcatacgttgttcaatataatcttgtacttcaggtttgaatgaacgtaccgtgccttgaacataagcattatctgcaataacattccaagtattacctgaagacacttctcctattgtaatgacagcactatcaaaggcagataaattacgactaataattgtttgcaaacttgtaattaattgccctaacgccattacagggtcattgccttgctctggcttggcagcatgagctcccttgccatgaattttaaattcaaaacgatctacagcagacgtaataggaccagatttaattgcaaattctccaatatctaatgttggataattgtgaaatccaacaatcgcttgtacatcatctaatgcattggttttagccatggctttagcaccatacccaagctcttcagctggttgaaataaaaaccttactcttccatttaattgttcttcttcttcttttaacttggtagcaatagctaagatactagccatgtgaatatcatgtccacaagcatgcatcactccatcattagtagaagtaaagtcttgactaacttgctcctgaataggtaacgcatcaatatcagtacgaacagcaatacatttttctccttgtcctatttctgctactaggcccgtttccattggaatgtcaatcattttaatattgtatgaagttaatatatcttttatacgttgcgtcgttttatattcgtattttgataactcaggatattgatgaaacatgcgtctccattttacaacgtcgttaaaacttgtcatcaatgtcacttccctttctctaagtccaataaaatgttgtatagtctatagtatcataattatcaaacttttcttataactaaataagagtagatatccattacttagaatggtggactactcttatctaaaagttcatttcaatttttaaaataactactctataaaatggtgaataaaattcgctgcaagttgagcagtacgatgatcaatatcataatttggattgacttcagcaatactaatagaagatgtctttccacttaatataacgcgtttacctatattaaatacagaatgaggattcaatccgaggacagtaggttcacttactccaggtgcaaatgcactatcgatggcgtccatactaattgtaaacataatcgtttcatgctgatgaataaaacgttcaatcttatctttaatggttggagacaaatcatttaaaatttcatctgcatatacatagataattcctttttcttcagcatattcatatagagaacgtgtatttctaccttgagataagcctaaaactaagtaatcaacattatcatctttttctaaaatttgtctgaacattgtaccagaattagattgtacatcagcacgcgtctcaaaatgtgaatcgatattaataatgccaatagaagcatcaggataagtgtgtctcgttgctaggtattgtgcgtatgcgatatcatgtcctccaccaataaaaaaagattggtgatgctgttgaataactcgagcagccaaatctcccatttcttcttgaacttcacttagagaaccttttgtatattctacatttccataatcaacaagagattcacattcacttaaatcaggtaattgggcaaacgctttttttatttcgtctggtccttttttagcaccaattcttccttcattcagttcaatccctttatcaacggcatagcctaacaaacctacaccaactttatcaaaacgattttctattttttctaaattagcaaatgtgacggtctgaaaatgcttaaactgcttaggatcattttgactatctactcttcctttccatagttttggattgctttcactgtacataatattagatgcctcctaattatttaaggttatcttaatcatataacatattttatacaatcaatacccatttttattaaattatttaccctttaatttatgattcagacattaaatattagtttcaaaaatttaaaaataattcaatactattacattttaatgatatttaaaatggacaatttatttatccccttgtaatatgtataatattaagaaaagaatatatatggttaccctaatggaggttacatacatgaagacgaaacgtatttcaggatttcaatggactttaacaatttttgtatttttcgttgttacaatggcattgtctttaatcctgcgagactttcaagcatctattggtattaaacgttttgtgtttagtattaataatttagcgccatttattgctgcaataatttgtattattgcatttaaaaataagcgtactcaactagctggtttgaatttctctattgatattagagttattgaacgtataatacttgcgttaattttgccgctcattatttttattattggaatgatgagtttcaatagatttgctgatagttttattttattacaagccaatgatttatcagtatctgtatttacaattatgattggtcatattttcatggctttctttgctgaatttggattccgttcatatttacaaaatattgttgaaagtaaagtcaatacattttttgcttcaatcattgtaggtttaatgtattctatttggactattaacacgacatatggaatgcaatatgcaggttatcacttcttatatacatttatgttttcaatgattgtcggtgaattaattagagcaactaaaggtcgtacgatttatattgcaacgttattccatgctgcaatgacatttgctcaagtattcttatttagcgaagaaactggcgacttattctctatgaaagttattgctttaagtactacaattgttggtattattttcattcttttaagtttagtcattcgctttatcttatataaaacaacaaaccaatcattagatgaagtagaacctaataattatttagaccatgtaaatgatgacatagatgattcaaataagatatctaatagtgaattggataaaaaagaaacgtcacatcaatcgttacaagaaaataatgtgactcatacacagactaatgaatctgaagtccaagacggtgatcatcatttaaaatcatcttctaaatatacagaaaatagacgctcatctgtagtggataatgtaaaagaagaaatcaatgatatccataaatctaataaataaaaagaaaagagaggaacttaaacatgtccctctcttttttacttcttattaattactttaattccttcttgagtgccaataatcgcttgtgttgtcatatctaaaaaataacctgtttctagcacacctgtgagatgaattaaaaattcatgtaattgataaggatctatcttactttttaattcacagtctaaaatataattcccattatctgtaataaatggtatatcctcattcattcttcgttcgactgagatatcattatatgcttcaatttttttagatatcagtaaccagttaaatttatcaacttcaataggtaatttgaaagtttcacctaagtaatttaccattttactttcgtctgctaaaactataaattgtcttgccatttcatcaatgactttctctctgaataaggcaccaccgcctcccttaataaggtttaaatctgaatcgatttcatctgcaccatcaatagctaaatctatataagtaatatcattaatatcaaccacattaatattatattgtttagcaagaaattcacttttattagatgtacatacacctgtaacatttaaattatcttgttgaatacgctctgcaatcttaggaatcaatagttcaattgtacttcctgttccaattccaagaatcatattatcttggatttgagctactgcatcatctgtcgtcattaatttgagttctttcgcatccttcatcggtactataactccttttcatatactcatttattattttacactagcctttttaaaatacctaggtctattttacattcatttaatttatcaaaagatatttttatactttttaaaaatatagtaaaataacagatatgataaaaaaggagaccataacatgattccggtatatgctatttcaactggtaaaattaaaactttaaactatgatcaaaaacgtccaatgcattctgctttaaataaaacaatgttttctggaaaaatgtggttatcttatacagggttcagtgaggatgaacaagcttataaggaccatggtggtccacacaaagctgtttgttgttttagtaagaaaaattatgcaatgtataaagatgatattaatatactacctgattatgcaatgtttggtgaaaatttaactctcgttgaccttgatgaaaatgatgtgtattttggaaatcaatatcaattaggagaggcaattgtagaagtttctgaaatacgtgaaccttgctggaagattcaaagaaagtatggtattaaacatttagttaagcggatgtcatcctcaggtaaaacaggattttatatgcgtgttttaaaagaaggttatgtgcagcaacaagatcatttattactccttaaaactgctgaatctcctacacgcttatctgttcaaaatttgaatgatatttattataatgaccgtgaaaatatagatcgtttaaataaagctattaataatccttacttatctcctaaacgtattgaaaaattgaaattattaaaagaaaaagcaatgaataaatagaaacataccactatcacttaatgtcatagtggtatgtttctgaataaaaataaagttatttttctgaaatatgatatattgtcttcgcataaaatggaacattagcttttagaattgatttagctttattgccttcattattaatatcattaggtaagtattgtgtttctagcgctacacctgaatgaggtttataaatattaaaatcactcttccattctgatgtatcattaaaagtaaaaattactatattagtcattgttgtttctacatctaacgcaaactcgttattttcaacgataagacgatgatgaccaatatcaaatgggtgatcgagacctttattaaaatgtatttgttctttaatttgtttatcttcagaattaaaaatatcttgaaattgaataggtcgatgattaaatcgttctaataaatcaataggctgttgactggaaataagatggttctgatcaataggatacatttttaattgttcacttattatagagtgattatcaatgacattattatctctatttagattaaagtacacatgatttgtaggattgaataatgtatcttcatttgatgttgcttcatattcaatcgtccagcgatgttcaacatcatatgtatgtataaccttaatcatcatatctccaggataaccatcctcttttgattgtatctgaagtttaaatataactttaatatttgttatattattttgtatttcataatcaaacaaccgtctgtctaaaccattactaccgccgtgaagttgattagtcatttcatttgcttccaattgataatatttattgttcaaattaaaagaagcattttcaatacgtcctgcatatcgtccaatagtagctccaaatttatatggattttcagggtaaaattcatccgcttctactttattacctaacacaatattattatcatgatatttccaacacacaattcgtgctccatagtttgtaaatacaatatacgtatcgtcattatctattttaattaaatctataccatgattttgtttctctacttcaactatcattacttacgtctccctctcaacacgcttgatcaggctctatttggtaaaatcattattaatacaccaataatgcatacaacagcacctaagacatcatacttatctggaatttgtttatcaaatacaaatgaccatatgatactcattataataaacactccgccatatgccgcatagacacgtccaaaggttggaaacacttgaaatgtagcaatcacaccatataagacaagcactagtccaccaatccaccctaaccaacttgattgtccttcccttaaccacaaccaaattagatagcctccaccaatttcacagagacctgataatacaaaaataaatattgaatatatcatttctttattcaccaacttttgaaaagttagtttcattgtagcaaactgctttaaatttcatctattacttttaaactttgactttatcatcaatacatattgttacacttttttaattaatattccataggttttatataaatttaaaaatgtaaacgctatctattaaatgttttttcattctctatcaatgcatttaatattttctaactctaacattttccactataataaaattattaaaaaatttagacaagcatccaaatgattcatttaaagaaagaggtatttatattggactttgtaaataaaccaacaattgaaacggctaaatctttattaggcgttaaaattagttatcaagatcaaacacaaacttatagtggctatattgtcgaaacagaagcttatttaggttttaaagataaagcagcacatggatttggtgggaaacaaacgcctaaagtcacttctttatatcaacgtggtggaaccatatatggccatgttatgcatacgcatttacttattaatttagtaacacgtgaagaaggtatcccagaaggtgtcttaatacgtgcagttgaacctgaagatggtatcgaaactatgaaaatcaaccgaaataaatctggtttcgaacttacaaatgggccaggaaagtggactaaagcattcaatattcctagagcaatagatggttcaacaattaatcaatgtcgtttatctattgatgtaaagaatagaaaatttcctagagagattgaagaaagtgcacgtataggtatcccaaataaaggtgaatggacagaaaaacacttaagatatactgttaaaggaaatccatatgtctctagaatgagaaaatctgattgtctattaccagaagaaacatggaagtaacacctcattcaataaaaaaatcgcttttgaaaaggtcatccttcttcaaaagcgattaatattatccacgttcaacttttaaatgtctttgttctatccaagacattaacttactatcaaaaacaattttactttgttttaaatcattaatatctttagcatctaacattgtcataatagatttcatatggtctataaatgattctacatattcaatggtactagtgataccagcatgttcaacttgatttaaaaatggacgtgacatgccaacagcttttgcacctaaagctaaacttttaattgcatctaaaggtgtgcgtaatccaccacttgcaaatacatttagtttatcttgataacttatactttcaagtagtgattctacagtcgattggccccaatttgaaaggtaatccatgtctttatttgaacgacgctcattttctatcgtgacaaaattagtgccaccctttccactcacatctacatacgtcacgcctatatttactaaagattgtagtaattctttactcatgccaaatcctacttctttaatgataacaggtacactcacgcgttgaacaattgcttccacattttctaaccatgtcgaaaactctctattcccttctggcatcactaattcttgtggtgcgttcacatgtacttgtaaagcttgtgcgtctaataattcaactgctttaacagctttatctactggtacatctgcgcctacattactaaatataatgccctcagggtttgttttacgtacaatactaaatgattcagccatcttaggatttcttaaagctgcatgtgtagatcctacagccatagctaagcctgtttctctagcaacgactgctaacttttcattaattgtcttagtccaatcacttccacctgtcattgcattaatgtacaagggaaatgtcatatcaaaatttgaagtatgactcgttaaatccacttgattcacattgatatttggaattgaatgatgtacaaacctcatacggtcaaaatctgattgagggacatcttgttgtgccattgcaatttctacatgttcattttttctttgctctctttggatatcactcatgtaacaacctactttccttaaactatgttctatattaaaaccactttttctttttaaagaagagaattaatgcaattgaaatgagtaacattatagttaaacaaataaaataaccataatgccattttaactctggcatatattcaaagttcattccatatacgcctactataaatgttaaaggagaaaatataactgacacgagtgtcaatacttgcataatactattcattctaaaagaagaataagattcaaaattttctcgaatttcatttgtcatttcttgagaggttctaataatattattttgtttaataatatgatcatcaatatgttgaatatacattgaatgtttataatctacaattaagttaccttcagtcttaattgtattcacaagttcctgcattgggaataatacacgttttatttttataagattagaacgtaattgaaagacattatccattacttttttactatgtgtatcatctacatgtgcatcttcaaagttgtatacctcatcttcaatggtataaacaaaatcaaaatatttatctaccatcatatcaaggatatgtataacgatatcagcacaatctaaatctggatcatgtttacgcgcattcatcttgacaacttccattaatgattcaaaatgatgttgatgataagtaattaatgtttttccgtctagaaatacgttcaatgctataggagtaaaattatctttatgcatactatgaaataccatgtattggtaatcatcataagatttatatttaactcgtggtacccctttaatggcatcttctaattctaaatagttaaaattatagttttcaatcaaaaaatcattttctttggatgttgcatcttcaaaatccaaccacacaatagtagcattattaggtacatcactgatttgttcaacttgagttagtggttcgtccttagtttgatatcgaattatcatggtcatctttctgtttcctcctatttaaccatacggttatcattctaccatgaattaaatattgtgtatgtgttattttatgttagtaaagtatttttataaaattttaaagaagggataaaatattatgaactatccatttattattcataaaagtgtagtatcttctcaagttgattttaaccaacatatgcacgatgcagaatataattcagttttcagtgaagttattagtgaatttaatcattataatggtttatcattgaaagaaagagaagcgcttaattatacaacatttacagtcgaagaacatacaacctatttaaaggaattacacttcgaagaatcattttcagttcgtgttcgtatttataattatgatgaaaaacgtgttcacttctttttagaattatttaaaaatgatgaaactttagctgcaacaagcgaaataatgatgatgggtattaatcgttcaacacgccgacctgcttctttccccgcacactataaatctaatatccaaatatactatgattctcaatatgataagcgctggcctaaatcattaggacatcaaattggcattccaaagaaaggagaggcataatgacagacactatttctgaaatcttagaaaacacactatttgaccttagtgatacacttaaaatacatttaattgaattaaatgaaaaccgttcactatttatgaatggacctagtcgagagctcattcaacgaacatttaatattagtttttaccaaggacaaaaacaagcgatagaagcattagatagagaaattaaaacgactacggatgaaaatgatttaatagctaatctaaaaagatattcgcaagacgttgaaaaacaacttttaaatgtaatagagttacatactacaacttatgaacccaaagaaaacttaagattggcacaatctctcgatacttattatcattgtaaaggccaacatgatataattagtgaattattatcgcaagtcaataaatattcaatataaaaatataggactaaagtaaaatctaactcgattctactttaatccttatcattattcatgaattgccttattaatttgtttaatcaccttatgagattcatgaattgggaataacgcaaagtcatgaaacatttttggatactcaaaaaattgtatagattgatgatgcgtttccaattcatatgccaaacgttgcatatctggataataaatttccttaccaccaccaaacattataattggtggcaatccttgttttattccatatatcggcgaaattaaaggatttgataatggttctttatcactccacacattcattatgttttgaagcccttgaatattaacaaagcgatctttttcaaccaaatattcagtaatttgaggatttgtcattgttgcatcaagcatcggagaaattaaacatattttgtatggtaaaggtttgtcattttctactaattgttgtacataactaagtgcaagtgctccaccagttccatcacccataataacaatgttttcattattaacttcacttaataacgattcatatacattattaattgctttaaatgtatctttaagatgaaactctggtgctttaggatatatcggtaaaacgacctcatataaagtgttgagtgcaagtttatccattaatctccaatggaatggagaaggttgtaacgtgttatacccaccatgaatatacaaaattttctttttagtttcgtgacgaaaattaaatctaaacacttgcatatctcctaaagataatttatcaagatttgctttcacatttaaagttggaggttgcttatgtttcgctctattaatatcttttctacgctccataaacgagttaaactcgtcttcactcttaaactgaattgagcgattatgtagtaaatatttattaacaattctatttaccatgcgtgttttcataaaatttttacctaccttataaatttataaaattaatcaaactttattacagaaagcttaaaaaaacgatataatactatttatatgattaaaaatgagcaatctagttcatataattgcctattgcatattaaattcagtataaatgagtcaactatagaaaacaaatgaatgacggcaaaggagtaataataatgcaaaatcaaaatcctaatagatatcaaacaaatcgccccccatatgtccgtgttaaccaacaagcttattatggtaaaaagaaaaattcgtggataagtttaattatacatatcatcattcttatacttgtagggattacttgttatagcatgtataaacagcctattctaaattttgttcttgcaaatcaagcgattgatttctctgagattaaaaactttcaaaatacaactactcagattggaccgctcaatattaatattagtgaagtcgctaacttacaaggtatcatagataaatttattctagcctttaatatatttttcgttttatgtattcttagcatgattatttcaattttaaccattgtatttaatagaacgattttaaaagtgattaatttcatcgttatcgctgttgtgttaatgattgctttttcctttagttatacaattcaaatggtaggaaaccaagtatctcagaacttgcatcattttttcttagatttagcaccaaatcaaattattactgaagcagatgctattcacaatgcattgatcttactttcaagtagtttagcattattatttataagctttttctttagaaatcgtcatcctagaatcaaatagacatgtcatctcattctatatttaataaaataaaaaggtattgaacgttttatatgtccaataccttttttatttattaaaatttattactttctttactcatcaatctgttatgttcagcttcagcacctttttttccttttaagaataaacttaaaatgaatgctaaggcacttaatgctgtagcaatccaaaatgcatcattgataccttcgattgaggctaatttatttacataagtcaagataacttgtaatgcaccttgttgacctccatattgtgcggccatttcacgtacatgatcttgaatgactggattagttttatctaattcagttgcaaatgcattaagatgatttgtagattgagttgtcattacagtaacaagaatcgcagtaccaattgaaccagctaattgtctcatcgtatttaagaacgcattaccatgagaaattaagcgaggtggtaaagcattgatagctgcagtcattaacggcatcataacaaacgccatacctagcgaacgtattacataaatactcataatatgaagataagaagtatccatattcaattttgttaattcatacgttccataagtcatcactgcaataccgaataaagcaagtggtttaagaccaatagtatcaagtaatttaccagcaacaggtcctaatacccccattaataatgatcctggtaataatagtaaaccagaatctaatgctgagaaaccacgtaaattttgaagatataatggtaataaaatcatacctccgaataaactcatcattactaccatgtttataacagtagtaagtgtgtatgttggtgattttagcacttctaaattaagcattggtgctttcattgttaattcacgaataacaaataagatgatgaacacaacaccaatgataaacattataatgatttcagttgaaccccatcctttattaccagcttcactaaagccatataataaagcaccaaatccaattgtactatatacgataccacgataatctgctttaggattgattgttttttgataaattttgaaccatgctaatccaaataagaaagcaagtagtcctaagataaacatcatataaaacataacattccaatgataattttggacgatgtaaccagataatgttggcccaatcgctggagcaagaatcattgcgatacccattgttcccattgccacaccacgtttttcaggtgggaaaatggtaacaattacattagatcctaatggcattaatatacctgcgccaatcgcttgtaaaacacgtcctcccatcataattgggaagttagttgaaataccacaaactaatgagccaattgtaaataatacaagcgctattaaaaatagcttacgatatgaatatttattaaataagaacgcacttattggtattaaaataccgtttactaacatgaatcctgtcatcaaccattgaccagttgaagcagaaatattgaattctgtattaattctaggtaaagctacattaagtaatgtttggtttaaaattgcgataaacataccaaacaacatagcagctaaaattttacctcttgtaatccctttaccgaaaacaaaatcttggttttgattttttatacgttcgttcacacgtccttcttgtgaatcaggattaataggttcataaatagaatctttggaaagatgttgattattaacatctctatcattatgatttactgtatcttcagaatgcgtattgcgttgttcatcatctgagtagtgtaaggaatgtgacgtttgcttttgctcaggatgaatttgttctgaagatgaatcttgttgctcttgttcttcttcaaaatgattttttcttttatcattattgatatcgttatcttctttataatgagattgatcattattaaagtaacgttttttctcttcactgatctgaggagatgatgcattctttgcatcgttattttgttctaagtcactcattttaaatttagatggattattttgactcttagattcttcatttacttgttgtccctttgattgatttaatttagatttatgatgtgatttcaacacgaataaattaattaaaccaactaaaatgaccgctgcaacgatatatccaataatgaaggtcactgtcattttatgacctccttagtctttatgaattttaacttcagcgttcattccaggaacaacatttttagatggttgtgaatctaaagaaattttcacaggaatcacttgtgaaactttagtatagttaccgtcactgtttgatgatggcattaatgagaaactatttgcagttgcttttccgatttctttaattttaccatcgattttagaatcttgaccgtcgattgttacatcaactttatcgcctttttcaatgctacttaaatcattttcatcgatattagctgtaatgtataaatcatctaaattatatgcataagcaattggtgaacctgcttgagcgatagaaccttccattccatcagttttagcaattgtaccatcttgtggcattttaattttttgatcttgagtttgaccatcttgaccttgagcagttacttctgccactgtgtcaccttttttcaattgatcaccttgttttgcgtcaaaagatttaatttgtccagatgctggactcgcaattttaatttgattaccgtcaactttagcgttatcagttgttacatagctagttgcattatgatagaaataaaatccaactactccgataataactaaagcaacgatagtaatgatattgattaacaccattttcttcattgaactttcctcctatttgcttttaaaaatcactttatatattataaagacatatcagtaaaaaaaacaccaacaaaacttaaaaaattgtcggttattttttaaatttaggtgacatgcatgaaattaaaagcgaaatataaaattataataagtatgatcgatttgctagaagattatcccttcgaacaaatttcaattaaaatgatatgtgcacaaagtaaaattaatcgttcaacattttatgataattttcaggataaatatgacttattgtctacaatccaaagttaccatctaaataagtatgaaaaattattaaaaacactttctaataattttcacaatataaaaaaagagcctgaaaaagtatttaagttctttcatattattcttaaatatatatatagaaagaaatctttttttcacgctatttttatctcaaatccaaatagaagtttagttatggactacttagatattacaaagaaatattacgataagattttagttgaaaatgaaaccttaattcaaaatagaggactttttatttcttataccattagcggtcaaattggagtaattctttattggctaagaagcggttgccaagaaagtcctaaagaagtagcaaattctttattatccaatacaattaagttacagagataataaagaagggagcaagacagaatcaaattaaactctgttttgctcctttttatttatctttttgttttaaacactttaaaattaataaggtgtaaaataacaaggattacaattgcactaataatgattgttagataaggcatactgttatattctccttttacatttaccaaaggtgtaacaatacctccaaataaaaattgtacaagtcctaataaacttgaagcactaccattaccagtggtactttcctccatcgcaatagaaaaccctaaagtagctacacctgtaactggagctactaatgttataaaaccaatcactaaaaaaatgaatgatccatgttggatgagcgttaacgaaacaatacatacaccaataatttggatacatgtcaataaccttaaaagtgtttgcgtatgaatataatctactaattttcctgttaattgactagagacgattaatgttattcctattccagcaaacatccaactaaaatgcagtggagagacaccataaattttttgaactaaaaacggtgaagcagaaatataactaaataataaaataaatgaaacaccttgtatgagcatgggtagcacaaatcgtggtgtacctaataagcttttaaaattctgaaatatcactttgataccactgctatctctatactctaaacttaacgattctggtatttttgttagactccccattaccattaatataccgaagatagttaatataacaaatatgactctccaaactgctacacttaaaatgatacctccaagcgcaggcgcaataactggagcaacaccattaactagcattaataaagataggaatttagttaattcattacctttatataaatcacttgcaatggctcttgaaataactgccgcgcctcccccagtaataccttgtaaaagtcttaagataatcataagccatatgttatgaacaaatatgattccgagacttgcaagagtaaaaatggtcataacgataattaaaggttttttacgccccaaactatcggaaatcggtcctacaaataaattaccaattccaagaccaatcataaaaaacgatagtgttaattgagcatgagctgtcgtagtgttgaaatcatttttcaattcaggtaaaccgggtaagaacatatcaatcgctaaaggtcctatagcagtcaacatacctagaataataataaataacaaggaatgcttatcttggttatgtctttgttccatttaaatattctccttagtatctatttaatgtttataatttgtaatattccattatctttattttcttctatttcataagtgacatattctatttctccgcgttgattaatttgttgtactttagctttaataatatctccactttgagttgcacttaacaactgtgagaactcaaaatgctttgaatcacttaaatgattttttatatctatatatgcatcagacttattttttagaaatggacttattatatcaaaatgttgttgattaatagcattatttagagcataagcatattgattaaaaaatggttctaacgtaactctaagtatactttcttcttcagttttctttgaaacataatcagaaattttatcttcatcaaagtccagtatggcactattaatgtttcctaaatcttttgcttttattgttttacttgtagacgtaaatgttttgtctttaaccatacctgtagctgaaacactaatgtctttattttgaggatatggaccatatatttttgatgcatcatatttcatttctttatcattaatagttacttttaatgtgtttttatctaagtcacttttaccctttaatttaactttaagtgcagcttcgttaaagttctcattaacatccacagtatttcctttagcatatctaaaatcaaatttcatttgacctgtaaaatgtccatattccgtgtctttttcagcatcgatagcataaacacctggaatgtatttgccaatagaagttgcttgattcgcctttgcatgaatgactctacgttttccaccagctttaaatttatattttgtatctattttcggcttaacaataaccgtttttataggtggtctataactcatattattaaagattaaaaaacgcgttccatttttactaatttttaatacatttttatctgtttttgtttgtatataggcagaatcatgattacttttatttaatttatctgttgtgtatttgacatcgtgaataaatttcatcattccaacttcatctttaatatattgaatataaacacttgcttcttcatcatctacaggaacatctttagtactaattaatgtcgctactttttgagcgtcattgttatcaatcgcgtttacaagaattttagtttgagcttcgggggaattgaaatttcttaatagtatgaaaacaataccaattaaaacaacaatgaaagctataatgacccacggaataaactttttaaattttaaattagattgttctgattgagaggacgatgtttctttatttttttcttttggtatcatatttccacaattagaacattgcttatcacttttatttaattcttgtccacaataaggacattgtttcattttctcatcaacttcctctcataagatgcaatgtcatttatatttttcacacaaatattataacccttttttcttgtggagataacttccgattaacgtttattttaccttagcattaaactgcttcacacgttcatctataatataaagcacactcagagctttttctatatcactactagataagtctttaaccatatcattcacaatttgacttataatttcgttattttcttccgtatattggcgccctttctctgttaagacaatatactttaaacgttgatctattttatcgttaggcttctgtaatgcaacaaagtcactttctattaatttttttatacgacgacttactgccgctttattaaccccttgtttttcagtaatttctgttatagataaagcttgatgatgactaagtaatcgtagtacattcgattgctcagtagaaacaccatattttacttgttgatcttttaaaagtttagacgttaatgtatttgtatcgtctatgaaatgtttcataaattcaatatgattttttgagattctattcattacaaatctccttacttaaataatttcatatattatgtagttaatttttatactctgttaaataatatcaataattttccacgttgaaaacaaatagaaaatataatagttgctaaattgtgaccctttcattacatttaaatatataaatagatatgaggttattaaatatgctagcaatcattttattatttattgttttaattattatcctaagtgttttgtttaatataagacattttatctccctttctttttttattacaagcgtgatattatgtttcaccattaatctcattaatatcatgaccatgactctaccaactggattgtttatattaattatcatttctaccatcggtttgcttgtcaaacattctcatctatttaaaataaaaaaaggaacccgtttcttaaacaaaatgtttcgtagattaataaatggtgtcttatttattggtatatttatatatcttagtacaataccattatctattttaaatggcatgtttttatggattgctttaattttatttagtgcttgttacactttcattatatatttaattttttcttctgcatttggacgtgctaaaacccataaacaatatgatgtgattcttatacttggcgcaggtatattcactgaaacagtcactcctatgctagcctctagactggatagagctttaaaaatctataaagtacagtcgcataattgcaacatattggtaagtggtggtcaaggtcctgacgaaccaatttcagaggctttagcaatgaagaattatctcatgaaatgtggcgtgtcatcttcttcaatattgatggaatcacaatcaagcagtacatatgagaactttttatattctaaatctttcattaatacatcgtttgaaaatgtccctaatattttatgtgtgacgagtcagtttcatattttaagagccttacgtcttgcacaaaagttaaatataaacataataggattaggaagttcaacgccttatcattttctagataaagcgcttttacgcgatttccttgcacttatgtatcaatataaattacttttgactttgtatttagttggactatttatagtatcaatttggatattactttaatatacaaaaagtctggatcattttcttatatgacccagacttttccatcatattcatactactcactttttaattaagtattttgccgtcttctaattttacgacgcgatcagcatagtcaaataatcgctcgtcatgtgtaatcataatacctaccatctgttcagattttatacgttccctaatcatctctactactttcgtagcacgacttgcatctaagcttgctgttggttcatcagcaagaatgattttaggattatttgtaaaggcacgcataattgctacacgctgcttttctcctcctgataacatatgtggaaatgcattcaaacgatctttgagaccaatttctgttaataaatatttagcatttgaagcagcttcttttttatttactcccgcttccttagcaataacagtgagttgctcttcaacagttagataaggaacaaggtgtgatgcttgaaaaataaaaccaatatcattaagtcttaattctgtactatttttataatttgaatacaaatcatgaccttcatataatatcttaccatcagtaggtgtcaacaacccacctaatatatttaatagtgtcgatttacctgaacctgatgcaccatttaaaataataaactctcctggttgaacttctaaattaatatcctttaatacgtttgtcttcgctaaaccttctccaaatgttttactaatatgttcgagttttaatgtcattattccatacctccaatagcatcaattggatccacttttaatactttgataaatgatagtaaggcaccgatacatcctacaataagaaaaataacaatcattaataaaattgtaccgtaacctaaataaaatggcatagtcactggcataattaaacttaatattaaaataagtattgtggctaaaataacacccaccatagtagttaaaataatctctataattaatgagcttaataaatgtctcgttttaattcctactgcttttaatatacctatttgtgagattttttgaatggtcataacataaaagaatgcacttaatacaattgctgtaatcacaaacaaactaattatcattaaattcaatggcatttgttctgcttggtaacttgcaatgttatcagtcaatgttttttcactaacagttgttacattagaaatatcattaattctatttttatcttttttacttaattctttaactggatagaatgtagaataatttttattaagcgttttaaaatctgaatgattcatcataaccattgaactatgagaatacattgtatcttcaataataccacttactttataagcttctttatgacctttaaacttaatcatatctcctttttttacatcttgtcccgttaatttatcatttattgcaacttcatgtgaatgattaggatagcgaccttcttttaaagagggacgatcttctttagaagtagagaacgtaagaatatcttgatcttgttgttttaattttaatgtttgtggtccaagatgtgttgcttgttgatttataatatcttctatcttattttgttgatttgaatcaagttgtgatgtttcaattttaggttctttcattttttcaataatatatgtttgtgcattttgattatttaaaaatgacacattttctctcgctaaaccttgagctaaaccattaataaataataccatactccctagtaagaagatgattagcataattaatatatatcgaaacttataaaattttatttctttccaagctaaattcatttctttttcctccctatttatctttattaaacagtatagagagtaaatatgaactgaatatgaacaacaaagaaaattgtcttagattttaaagattcgtataataattagaaaaggagcgaaaagtaaatgataaaatgtttaattgtagatgatgatccaaaactcttgcattacgtttctaaacatttagaagcggatcatataaaaaccgtgacacattcgagtggagaacaagcattaaaatatcttaatcatcatcgcgtggatatcgcagttgtagatattatgatgacaggtatggatggatttgaattatgtcaattattaaaagatcactatcaattaccagttattatgctaacagcacgagatgcattaagtgataaagaacgcgcatttgtcagtggcacagatgactatgtaactaagccatttgaaattaaagaattattatttagaattcgtgccgttttgcgtcgttatcaaattaatacacaaaataagattgaaataggaaatgtcattttaaatgatgaatttatggaggtaagtgtagcatctaaaaaaatgaatcttcctactaaagaattccaactcctatttttattatgcactcatccaagacaaatttacacaagagagtctattattgaaaaaatttggggtttcgattatacaggcgatgaaagaacagtagacgttcatattaagcgtttaagaacacggttaaaaaaattagaggcaactattgaaattcaaacagtaagaggccagggatacaaggtgaataaagatgtttaaaacactatatagtcgcattgcaatttatactattactgtgattatttttagtgcattagttagttttttcattgcaaatatacattatcatttcaatctcaaagaaaataatgacactaaaattatgcgtacgttaaaagaagctcgtacttatgaacatcaacttccttcaaaatacgtaaaatcttattttcaacatttaggacaaatgaattatcaaatcgttaccgtcgataaacaaggacaaaaaacattttatggtgaaccttttagaaaagatacactgtcctcatcatctattaaccaagttatgcgtggtcatgattatcacggtataaaaaacaaaccttttgaattattcgtgacaggtttttttgataatgaaactgataacactgtgggcataagattttatgaagaccatgaacctatagcagtatttatgcgaccagatataggtaaaacattcggcgagtttagaatatttttattggtattacttattttcttattgctgatatctatttcacttgttattgcttcaacatactcaatcattaaacctattaaaaagttaaaaatggcgaccgaacaattaatgaatgggaattttgaaacacccatttctcgtacacgtcatgatgaaattggaactttacagtttcgctttgataccatgcgtcagtcattaaaacaattagatgacatgcgtcagcattttgttcaaaatgtttcacatgaaattaaaacacctcttacacatattgaaagactattaactgaattacaatctgcgcattcagaagatgaacgtcatagtttaatcaatgatattcatttagaaatcacacgtcttagtaacttaataaaagaactactattactatctgaattagataatgcgaatcacttatctgttgacgataaattagaattatcttcactcattactgatatcattcgacatgaacaatacacgattgatgataaatcattgatgttattatctgatatgcataacatatatttccaaggaaatcgtcgccttttacatcaagcattttcgaatctaattcaaaatgctattaaatattcagatataaatggcattatcgatattactttgaatcaagaaaataatcatattatttttgcggtaacaaatgaaggacaaactatttctaaacaagcgataccacatctatttgatcgtttttataaactcaatgctagtgataatagtaatggtttaggactagcaattactaagtccatcattgatttacatcacggtaaaatatgtgtatctagtaattctgaaagtggcacgacatttaaaattctatttccacataccctattttaacttattagacaaaaacaggcagtgttaaaaaggacactacctgtttttttgattatttcacatttaaatattttcttacttctttatttactgcgttataaacttcttcatgctcattaagtttaagtccatacgatggaatcatctctttaatttttggaatccaagcatcaaattcatttttgtaacagcgttttaatacatctaacatgatatcgacagctgttgaagctcctggagaagcacctaataatgctgcaagtgatccatcatcagaagtaatgacctctgtaccaaattgtaagttccctttactatcttctgtatctttaatcacttgaacacgttgtccagcaataacaacttcccaatctttgtctctagcattcggtaaaaagattcttaaatcattcattcgatctttatgactaagcattaattgagaaactaagtatttagttaaattgaactctttaactcctgctgttaacatcgtcacaatattattcggtttaacagagcgaattaaatctaaatttgatcctgttttcaaaaatttaggtgagaaacctgcaaacggtccaaataatagagagcgttctccatttacaaatcgtgtatctaaatgtggtacagacatcggcggtgctccaacatctgctttaccatatacttttgcatagtgacgttcaataacgtcttcgtttttacaacgtaagaaaagaccacttactgggaaaccacctacatgtttagactgcttaattccagttttttgtagaagtggaagacttgctcctccagcaccgatgaacacaaactcagattcaaacgtatgaattgtattagagttcaaatctttgacagtcactttccaataaccattgttcaatcgttcaatattttgaacttcttgatgatacgtaacgtctacattacgttcttttaaattagaaattaattttttagtgagtgctccaaagtttacatctgtaccagtttcatcacgagataatgcaataggaacgggtgatgttctaccttctaccattaacggcacccattcatcaatttgatcccgatcttctgtgatttccattttttgaaataaaatattttcttttaaagcttttacacgttttttcaaaaagtctacgtttaaaatacctttaacaaagctcatatgtggcacagattgaataaaattacctggatgttctagttgaccagttctgactagataagcccaaaattgtttagatacttggaactgttcattaattttaattgcttttgttacatcaatactgccatctttattttcttttgtataattcaattcacatagagctgaatgtcctgttccagcattattccatacattagaactctcctcacctgattgttccaatttttcgaaaattttaatttctttttctggagataagtcttttagtaatgttcctaatgttgcgctcatgattccgccaccgattaagatgacatctgttttgctatgttctatactcataacaacccagtcccccttttataattacatcttcagtcgaaataaatacgaccattttcaatttaaaacgctttctttaattgataaaaaataaatattaatttgacgttaaaaacgtaaacaaaattttaattactatagtaattatatacataatttctctttgaaaaaagtatttacacgaattattacattatgtcatctctgttttcaaaaatattttaattttattataaagcccacaatatttatacagttggtttattacatgctataatttttataatattattaataacgaggtacaatcatgaaatcatttacttttttaatgcataatatatatgctttaggtggcacagttaaagcaattactgaattagcaaataccttagcggacaaaggtcataacgttgaaattatctctgtttttagagctaaagataagccttacttcaaacttaattcttctattaaaataaaacacttagttgattatagactaaaaccacaaaatgtgatttctatcttcatgaatcggcttaataaatacactcctttattaaagcctatctacctttcaaaacatgagcctggtttaaatcaattctcgaagtatattgaacataaattgatacgcgcaattaatgatatagataccgatgtactcataggtacaagagcaagttttaatatatttatttctaaatattatcatggacatgcaatgacaataggtatggagcatatgaatttaaatgcctatcccaaagcatatcgacaagaaatattagatgcttatcaacatctagacgcactaaccactttaactcatacggataaagaccattatgaatcattcattaaaacgcctgtatatgtcgtccctaatattattcgaactaaaaaattaaatctacctaaaaaaaatattattttaagtgccggacgtctagaatatgaaaaaggttatgatattttaatcgaaagtgtccaactcattaaagatacgcttagacagaaaaaatataaaattgagatttatggtgaaggtcaagaacatcaacatttacaagaaactattaatcatcaccaccttaatgacttaataactatacatccagctactcaacaccttaatgaaaaattagcgcaaagtcgaatgactgtcgttccttcacgaaatgaagggtttggaatggtcatattagaagcaatggctcaagacaatattgttattagttttaaagatacacttggaccttcacaactgattcaacataataaaaatggttatttagcagactatgagaatgcacaatcattagcaaaatatattgatcttgctattcaaaagaaagagcattcagaaaacatgattaaatcgagtcatcgaactcttgaacattattctccagataaaatttacgattatttttattctattttcaaataaaaaaggattgcaatcggaattctccgaattgcaatccttttaatgatatctacataaatatagataagataaatgtccaaatacagataaagataagtaatcctatactgtatttcagagtcattttaagtaattctgattctttacctacttgttttacagctgctgttgcaatcgcaatagattgtggtgaaatcaatttagctgcaaccccaccaacagtattagctgcaacaagtaatggtgcacttgtaccaatttgttgtgctacagaagcttggattggtgcaaataatgagttgttgtttacaactgatcctgtcataaacacaccgatccaacctaatactggagataagattgggaagacgccacctgcttttgcaataccttgacccatagctgcacttaaaccgccataagttgtgattttagaaattgctaagatgaagcaaattgttacaattggtaaccataattctttaaatgcttcgacaaataaacgacctgcatcaccaaagctaacttttttagacattaatactgtaataataattgttagtaaaatggcagtaccagtttgaccaataaagttaaaagttaacataattggtttgtgtgtaacatcactgtatgtgcctggtaaattgaaattaaatactaatgctgataaaggaccatttggtgcaaataagtttttgaagaatgttgcactccaaatcataacaataacagttaagataatgaatggactccatgcgtatagaatttctttaccactatgcggtttaaccgcttctggtttaacatctttttgaattctaaagatatttttcggttgaacttttttagaaaatactgctaaaactcccattgttactaatggtgggataatatcagctaattctggtccaacaaatactgtaattaaaccttgtaatacagtaaacgtaattgatgctaccaaaatttgaggtaatgtttctttaatacctttaaatccatcgataataaagattaataagaatggaataataaagttaataattgccaaagttaaagtagatgtttgagaaacagccatagcttgtacgtgacctggtaaatgaagtgtattcacaatacctactggaataccgattgcaccaaatgcacctgaagccgcattagcaattaaacataacattgctgcttgtaaaggtttgaaacctaattgagcaagtaataatgcacagattgcaattggcacaccaaaaccagcagcaccttctaagaaaccattaaacgcaaaaccaattaatagtaattgaatacgttggtcttgagagatactcatgatactatcttgaatcgtactaaattgacctgattcttgagtcgttttatataataaaacggccataataacaatataaccaatgggaataataccttgatagaatccctcgattacaccgcctgtcgcaataccacctggtaatttaaagaatgggatagcgataagtaaagtcactactaaagtagtaattgctgcataaatacctttcattttaaaaactgttaaacataacaagaataaaatgattggaatcgctgcaatcaaactagataacactaagttaccaaaagggttaaaagaatgtactaacatagtttaaacgcttctttccttaatattttattatattgatgaattatctagctaaacaactaaaaattcacttttataattttaacaggtattcacaaaaattaacatattgtattcaagttaaaattagaatattacactttttacttttgtgaatattttcacaaaaataatataacatttcttatcacaattgacaatactgtaaaaataatttatgtcaacaatagtagtaaaatctatttgaattttcattaatatatgattttatatgatcattcatgtaaatatgaattttttaaaagtgcatggtaaaataaaaatatgaaatttaggagttaaaggataatgcataatgattaaacaaataaatatatctaatatggcacatctagatatacaacttaataaagctaaatctgcagggtattcacattttatcccctattctaacgaaataaaaattaatcaagacatgcttaatgctgtcccattaggtgaacattctattgcggttgattacacaatccatggtgtttaccttaatgattgtcgttattttgggaatgataaattaagttttctcgcttggatgaataatattaatcattatccaaatatcatttataatattgatactgcgctgatttacctttcaaaatatcaaattcaatctattatggatctagcagtcatcactattttaaaaaatgagatcgatatagatggacatgttgtttttgattttattgaagaattacagacatctagttcattttggaattcattagatacacgagaaattaaaattgccaatcactttgatttaaataaattagcttatatccacggccattcgattccatttcctaaatataagtatccattagctgacgaaactcttcgttttgctgatagctggcttgtaacaacaaaatttaaattacctaaatggatgtacaataaaattcatcaacgtgctattcaaaatcataaaaaattaagttatatctatactaaagatacatccaaattgaaaaatcatgtcgtatttttaggattcgattatggctataggggtaactctaaatacctttttaattattttgtaaaacgaaatccaacaacagaagcttattacattactgacgatagacgtggaccgtatttccttcccattgatgcagaacataataaagaacttattgaaactgcaaaaattgtagtcattgaaagttatatgcctgaagcttaccaacctaatggtacagtcattcaattatggcatggtacacctattaaagaattatttttagatagtaaagaaccttatcaaaatcaaactatttataattacagagcaagaaaatataataaatggaaacaccaatcatatgtcttattagattcaaaagcttcagaaggtttatttgagactgcttttcctaatgaaacggttcaatttcttccttttggttatccaagagtaagttatttactaaactataaagataatcaaaatcagcaaagaaaaatacgtgaaaaattaaaactcaatcatacaaaacctgttttattatatgcgccaacatggcataaaaatacagaatcatttacgcctttaacgatgacaccagagttactagaaaaatactatgtgatatataaggggcatattgaaggtgatgatgctattccagaaggtgtcattgaggctcctatggatatcgaaacacaagacttaatcttagtatcagacattgtacttactgattattcttctatcatttttgatgccctaactattgataaaaaagtttgtttatatactcctaaccacgaagaatataaagaagaacgtggcgtctatattgatgtgctgaatagtctagcaaaagtttggtacacagacgaagaattgttactaaatcatttaattcatgataggattcctaccattcatcaacatgcacttataaatcgtaataatcaatctctaaaaaaattaactcaacttatgagagatattttagataaataataaagcactaagcgtacagaacttttctgtacgcttagtgctttattgtgttattttaaatttctttttccataattaaatccgtgtctattacattaccattaataaaatcatgttgtcctgtaatttcaaagccttgctttttataaaaatcaatggcagaaggattattttcccaaacacctaaccatatttttgatttattatactcccttgctttatcaatcgctaattgaataaattgacttcctctccctccaccttggtaatccttatcaaaataaatgcgctgaatttctaaatattgattaccttttggttcagtttgtgtttcattaatatttaattttaaataaccagcaatctcatcatcgaccttatagaaatagtgaaatgattgatgatgttcgatttctgataataacttcgtttcattatagttttcttcaaaaaattttttaaagttttcatcagtataactacctttaaaagtatcataaaatgttttttctgcaatttttcttaactcacttacattatcttgtttaatttcttcaatttcttctttcatatttcccctcttttattgtacttattttttcacaaaactagataataccttattccttatcaaacacattttaaacactatattaaattattttattataaattaaaatatatattgataataattatcaataagtataaagtaaagatagactatattaaagtgaggtgtttaagatgtttcatgagttatttatattaggtattgctggacctaccagtttagtcattattagtattgttgcattaattatttttggtcctaaaaaattgccacaatttggtaaagcgattggcagtactttaagagaatttaagtctgcagctgaacatattgattcagatgaggtagaggaaacacccagtaaacattctaaacaacagcgagacaaatcaaactagttcgaccttactcgcacattttgaagaattaagacgacgtttaactaatatacttatttcatttttaatttctttgccgttagtatacatatcatctaaatggtggatcacaacttttgtttatcatattaaacgcactcaagttgttttacatactttttcattcactgaaatgattcaaatctatatactaatcattagttttgtaactttatgcttagttcttcctattattttctatcaattatgggcatttatatcaccagggcttcatcgacgtgaacgtctttttatttataaatatagtttattatgtactgcgttatttatcattggtgtcggtttcgcctatactatcggatttccgttaattataaaattttcattaacattatcgaaaacaatgtatattcaaccggtgattggttttaatgcttatttacatgaattaataaggtggttatttatatttggtgtcgtctttcaattgcctgtggtttgtatgggactagttaaaatggatgttatagatattaaacaattacaccaatatcgcaaatatatttattttacttgtttcattattgctagtattcttgcaccacccgatatcactttgaatctatttttaactttaccactcattattttatttgaaataagcattcttttaactaaaataactactcgacattaatgaattcgaatcaaatgcaaaagtctcaaacgagtgaattaatccactcatttgagactttattttaacttagatatgatgctttagtttagtatgttttaaagtaaaataagcaattaatagtatataaattaattgtgcacccatcgcttcaatacttggataaaaaccaatgatattaagtgttggaatatgttcaatactatgttgtgttatcattccaagtaattgtaatttttgaatactaattcctaacattttaaatgccataataaatattaaaatagaaagtactctaaaaatgagatatataggtatcaatcgtataactgttttgaataacaatgtaaatatgattaatataacaatggctagtataattcctataacaaaatctaaagtttttatacttcccatcattcccatataaaagataatgacttcaacgccttctctcaaaacggatattaatccaattgtacctaataatgctaagtttctattacttattgcatggtgatacatttgttgaatcatatcattccatcgcttagcacttgaacgtctatgcatccatatacccacaatatacattaaaacaactgctattattcccagtgctgcttccataccttcacgtaataatccattatttcctagtacttgaataaagataagtgctaatgcgagacttaaaatcaaacctaatatagcgccaccaatgacacttgttgtccctttagtgtctctaacatttcttgtcatagttgttaatgtcaatatgattaataatacttctaatccttcacgtaaaaagataatcattacatctatggatgaatacgcttcttcacttacagtatctttaatttcagaatttatttttattaaactttctttaatgcgatccttattactattatctaaaatactttgataatatggaattttatcttcaatttttgtatataaactactgtttttagtttgaattttgccttcaacataaggccatatttgtataaatttagtcagtgcctcatctgattgttttaactgatgactctcaatacctttgattgctttctctaattcaatattaagttgggtaactttatattgctttgtttcggtatttgattgctttttatcaacagtatcaatacttgttttaaatgtcttccaagcattatctactttttttatgtctaatggttctttttgaatagctacacgcaattgcatcaagtacacttctatttgtccatatttattctcatcataatttctaatggccgtttcatgatttttccaagtttgatttaacatattattaatagactgtaattttgatctatctttattttttatagcttcttgaattatattatcttttgtgtcaatttgtttttttaaatttttaatatctttattaatatcatcagtcgatactgagctttcgtaaacgatgagagattttgttaactctgataacgagtcgatttgtttatttgtagtcgttgcttgatcaagcatatgaagtttcgatttaacatcttttccttttttattttctttaatatttaaagacattattttatgttttacttcattcaacacgttttgtttttcgttataatttaattgtttgtgctctaacgtcgatttcgcatcagagatagctacatacgcatcatttaattgactatcatttgcaacactaactgaagtcaatgaaaacagacgtgtaataatgattaagagagtaattatcgatatcctaattaaagagtgtttcaccgatataacctcccttttgtatccctggtaatacaagaaatgatgcagaacctcgatgtgtgatatattcatttaatttatcattgtgtcctaaattattttgaatatcgataaactgttgaatagatttttggaaacaaataaacatgagtccagtatctaagtcacctgttttagcatttgtaccatcattataattatatgctctacgtttaatagaagtttttacttcacgagctaaacgtgtatgcgcattctcatcgataacatacttgcccttattatttttagcatttaaatcaatattatcgaattctttcttacctgttagaggtgcacctgtagaacgtttacgaccaaatgttgcttcttgctcttctaatgcggtacgatcccatgtctcaatatgtatttggattcgtcttataatgcaatacgttccattttctgcccatccattatcaataaatacatattttttcaaatcgttattttttcgtggattaactgtaccatctttaaatgccattaaatttctcggtgtttcattttttttagcagaaataaaaccatgttgtgaccaacgaattttaatgatgtctctaaaaggtcgtattaagttatgtatagcatgaaaagtaacttgaggatcatttgaacatgcttgaatcataatatctccatcactatactcttcatctaattgatcattaggaaaatgaggtatatctctaaaatcaaatggaattttagatgataatcctatttttttcaaaaaagacttactcacgccatatgttaaagtgagtttactagcatctaatcctattgattcaccagtatctacaggtggtaatagtgtattgttactattttccccaataatagcaccgtcagtcatactaacagacatttgagtccattttttaaacatatctttaattaatgtttgatctttggactttaaatctaatgcaatgaaattacaatttttttgagttggtgtagtaataccagcttgaatatgtccataaaattcatatgaatcgttttcttcactttcaggagtatcaaacatagatttaaacgaaaagatactgcctacactacttgctccaataacagcaccagcacttcctatacctagtaactttaaaaatgaacgtctagtcatttgagggtgatttttatgatttatattactcattctgtaaccacagccattttacttaatggttctcctagtgagttaactgcatctgataaagcttttctatcttctttagttactgcactataatctttataaccatcattgtttttatatttatcaagtaattgattcactttattaaaattatccctaattgtagaactcaattttttgtctttcttttctaattcaggtttaaataactcataaattttttgagcaccttcgatattggctttaaaatcatataaatcggtgtgagagtatatctcttcttctccagtaatttttgatgtagatacttcatttaataaatccactgatccttgtagcattaacttaggcgtaatatctaatgtatctactttagcatctaattctttagcatcttttagtaattgatcagcatccttcttagtcatttcatctattttattttcttgataaagagatttttcaattttatgataccctgtccatttatcttcttttttctcttctttcatatcagctaggcgagcatcgattttaggatctaaatcgccaaatgcttcagctacgggttcagaacgttcataatacatacgtactttaggatacaaagtttttgctttttcaatatcatttgcttttattgcagatacaaattcttcagttccttttaaaaactgatctaactgtttatttgtatattttctatattctttagctgctttctgtaatgctactttattatcgtttgtcgattcttttgaagttttttcattggcattatcgtgattattatgaccacaagctgttaatagtagtgatgatgttagtaaaatagttggtaatttcttcataataaattcacctcattaaaatttagtgattatcttttgatgttaaatattttaaaatgtatattctctacatctaaattttaaaattgcagttttatatctctatcaacatgattattatcaagtgataatcattatcaataaaattatatatttatgctattttactgtcaatataattatttttttatcaaaatacagactattttatatttaatttatataaactttttaacttaatgactcatttaaaatgtggtatggttatttaggatatgcaattaacatctaattttttatttttaaggagtacgattttatgagtgtaaatttcaaagcgtttatggttgaaaaagataatgatggcaccgtcacaagtgatttcaaggatttatcaatcaatgatttacctgaaggtgaagttttaataaaagttcaatattctggtattaattataaagatgccttagccactgttaaagatagcggtgtacttaaatcatatccaatggttcctggaattgatttggcaggtacagtggtagaatctgatgaccctacaatcgaaaaaggtgaagaagttattattactggctatgatttaggcgtcaatcattacggtggatttagtgagtatgcccgtgttaaatcagattggattgttaaatgtcctgaaaatctaacacttgaagaagcgatgatttatgggactgctggttacacagctggtttagcaatagaaaaattagaaaaagcaaactttatgacacttgaaggcgataaagtacttgtacgtggcgcttctggtggtgttgggtctttagctgtaatgatgttaaatgaacttggttataaagttgtagcaagtactggaaataaaaaagctacaaataaattaaaagaattaggagcaagagaagttatcgatcgtatttctgaagatagtaatgaaatattaggaaaaagaacttggcaagctgctattgatccttgcggtggtcctggaacaccttatatagcaaagcatctaacaaatggtggtggtgttgcattaattggtatgactggaggtaaccattttgaaacttcagtatttccatttattcttcgcggtgtaagcgtcgttggacttgattcagttatgacaccaatgaaattacgtcaacgtgtatggagaagattagcaactgatttaaaatctgataaattacatgaaattaaaaatacaattgcttttaaagatttaaaacattctattgagacagtacttaatcatgagaatgctggaaggattattatagattttgaagcatagttcatatttatttaataaaaaagagcaagaaacccagtttatagtggtttcctgctctttatttttaaagatactaagttatatcttttttatcttttattcttgttatttttttgtttttttctacgattttttaatactaatcctagaccaactaatagtgtcattaattcaatctctaattgaatagatgtactttctgaaccagtatcaggtaatctatgtgatttagataaatgactgttattagattgaataccgtcaatatttgattgattttgattattgtctttattgttatgacttaagatgttttcaattttatcaatatcaagcatattcaatttgtccattaattgttggataattgaaccgatatcatcaatatgtgatttatcaatttcttttaacgtatcacgtctaagtttttcaagataatcaattaatttagctttttgttcatctgttaaatctttgcgtgctttaatttctttaattttattatctattaacgcattagtaatttcttttgcaacaattttcgctatattatctttgccctctttaagtttacggttaatttcattgatgtcattggcgttatcaatgttttcaagcactttttgtaaagttttatctatttcagctaccactttttgtttctgagcatcagttaagttagaattatttagaatttcttgatgttttttattagcaaaatcaataatttcttgtttagccaaagttttagcatcaattaatgcttttaatttatcgatttctttttgagtattatttttaatcttattaaggtctgttaatgtagttgcattattaatctgaccttttgcattttcaagaagacgctctaatttagatttaagtttttctttatcttctttagaaaggttaggattgttgtcaatttcatctttcaatcggttaacttcattttctaactcttctaaagctttttgtttagctaattcaacttgatgttttccatctaaatcatattttgcttttttaatatcttgaattaatttattaatttcttcaagtgatgcatttgtgccaatacctttatttattaagtcttcagcttttttaataagttcatcataagcggattttttatctggtgaagcttctgaataattaacagaatgcttgatatctaaattatcagccatttcatcaattaaatgtttcatagctttatccacttctttagctttattaataattatatctaaattatcacgtgaattttcattatctatcttattgttaaacgcatctttttgcgcattgttcaaatgttttaagctttccaatatgtgtttaacattatttctagcattttgtaatttttctacaccatttaaattatttttagcatcaattatcttatctttaagttgatttatcacgctaggatcaataataggattttttgcatcattaattagtttttcagcttcttttagagcatcatcataggtatcttttttatctttatctccatcagtataattaatacttgctttgactttatctttttcagcgatgttttcttttaattgtttcatcgcatcatttaataaatcagtattatgtttaatattttctaattcatcagaagttgtagaagcttttgtcttttctattaatttatccttttgagcatctgttaaatcagtttgttgtttaatttttttaataatagcatcataatctaatattaagtcatgtttagcttgttcaagttcatctttagcacgtttcacattttcgatagttttattaatttcatcaactgttgaagttgggttatcaataactttttgtgcattagctaatgtatcttttgcttggcttaatttatttctataatttccaacagaatcactagtcatatttttagtttcaggcacctgattaatgcttgtttctaaattgtttttagcattattcaataaagttttgtctggaactaaatcatgtttagcttgttttaatgcaactgtagcttcatttactttagctattgcttgcgcaatttccccagatgttgcatcgtcattttcaatcactttttgtgcatctctgcttacttgttctgcctctactttcttagctttataattattcgcagttacttctgtcattcctggtgttggatcttgttctgccgttgcttcatcaagttgacgttttgcttcaattaattcactattattttctttgtcgtgaagtaaactaatagcattgtctaacttaggttgtaccgcatctatttttgcgatagctgctgtcacttgggctggtgtcacattgtcatcatgaatcactctatctgcttctgtttttgctgcttcaagttcatcatgaattttagccatttcattattatatgcaatcacactcgttggttttttaccttcgaaaacaccataataaatcactatatttcccactcattcaaaacactgtaaaatcaacaattataaccttataaagttaaaatctacattcatacctttgccctttacttcaaatatatgcccttttttcgccctttttcatcaactaaaatatgaatgtttaaattaaagtgaaaagatttttattgaactagaaatataataaaataaatttagaaagtatcgattttaaaaaaacttatcaaccataagaggtgtaaacaatcatacaattaaaaatatttttcttagtcccagtaactttagctttactattccatttaccaagtataatttatgtattttttaaacgtagaaatcctaatacaaaacatcctaaaattttcgataaaatcttaattggctatgttatcactgtagttattgcagttttaatcgctttttttgagggtttctattcagagttaaaaaatattaatgataaacaaggtgctattctatatatcatgtaccttattacttttatattcatttatgctattcatttctttatactaaaaagatctacaatttattctattagcgataagatttttcgaataataatttatagtattattttattaattagttttttaacatatggtatagcacctatttgcaatttagatattttccaaaaacatatatctatttggaacaacacattaacaactcttatagtttttgaggcagtattcttcttaatctttacaaaacaaaatgattaattattcttttaaaagcatgtccatatatttaacacttacttagtcatttcttgctaaaaataatgtatgtttcccaacattaaaaatacgccactaaaaagtggcgtttaaattatttcagcatatgtctttaatcatcatttttaccatcttctttaattttaaaaatatctcttatcaattcgttacttcctatccaattagaaatagtactcataataaagtttactaattttcctattagttccatagacatatctcctttaatatctctactttactaataccactatttaatttttttaattataaataaaaaacgccactctatgagtgacgttttaacggttaaatctatatatatttaacttattattctaaaattattagttattttgtaaaattttttttaattcttcatcggaaacttttctagcaacttttactagatcaacagctttatcttctttactataaacaccaaattctttatttattttttcttctcttgcccatttttctgctaaacttttagctcttcttttattacgtacttcttgtatcatttttaattgtgtctcatatgaaatagacatttataccacctccaaaatagcatacataatatgtttatctttatcttccaaaatatcttctaatttataatttgtttgtttatctaatataaattctttttcgtattttgctttagagatattttcaatgtatgcacctctagcacttttaggaatgttaaagattaatatataatcatattcactattttcctggcttattaaagaaaagtctcctgctatgtcataattgagtgatgtactcttaaaactctcaaatgaatcaaaagttcctttatcattcttgattacatttctgaactcttcttcacttacaccacgataagcaataatatctattgataaattaaatttacatatagcactactaatactattgacttgtaattggatagatttttctaaaacttgatgtgttcttaataaaatatttataacttcgtaatcactatcagtatattttctaatagcatctttctctaaatcgcttaaagagctaaaccacttctcttcatcttttcttaatatttctatttgtttaaagaccattatttttttactttcttttaaatttacaattatataataccatatttagtagaattttataaatacttaatagatattcacaatttaaaataaagaataaacttcataaatttagtactatatgttcttatcacctaacttcacagatagcactattcttctatctacactattcttcaccaacattaaattaaaggatagtataatacctactcgctctgctgcatttagtgagttccatatctctatttccttatctgtcatgagatcagtataggtaatagatatattatttttcactgaatattgacacataaaaatagttcatttagtattaagttgtaataaaaaaactcacctattggcgtaggtgagttaaaattcataatagtttatccctaattaaatataactattatttaatacactttgttatctagctcttcactattggcgtagtggagagctatttcttttttaaattttttaaaactacatcaaaataaagtaatattaatacactcatactaaaaattgagtcaatatttatattaattaaattaatttccatagactatcacctccatgataagaagagatagactattacgaatatctttaattctagcatattattatgctgcaaaaaagttaatatgtgatgtcaaatgttcgggaaattggttgaagatacgtcatatctatattaaaaactcagaaaaatttattttctcttttttaaagtattttacttgactttatttaaagttactgaattctgcagtcctaaattaggattacgtcgtgtattaacatatgcttaaattgggaatgtgcctatgtatcgaagtggttgctatattcacttacctaacgtcgcaagttgaaagatatgagggaaagtgtcgttcacatatctatgtgatattcttttttgtttcatcaaactacttccctattttaaggtactgattacaatcatctttttaggtatatttgttttcattaaatcatgaaatgtacgccttttacatattcaaacagttactaaaattcactaaaatgtaaagttttgacaagttataaataaaaaaactgcacccaacggatacagtcattttaaaggatactcgattttgagtagtaaatattagtagctggatttattatcttataaaaggctctacatgtaaatagaaaacgcttactttttataaataaaaatttttcacgtcatacttacattatttttcatctttgcaatatttctatatagtatcaagacaagaagaaactcgttccaaaaagcaaaatcaaaactaaaaattaaccctctttatctactttttctaaaccaataatcaataaaataagaacagataaaagcataaaagggaaaaatatagaagtaattaaaaaacctataatcataattatataaaacgaatcaattttgtaatttcctaatttcatgcaaaaactccttttgttttcttctcaaaaaataaaattgctttattccaaaatagttcttcttaacgatcaataaattttctcggcataaatgcgtcatttaataattgtgataacgtttagcattccaatatacaaaaatcatgaaaagtaccacataaatgccaaaccaagaatctaaatagttttgattcatttgtttataagcaaagaacaccaaaaatattgccaaaatcatttgtatactaaacaaaatccatttcaaaattatcactcctttttagaagaactttatcacaaggactatttaaattttaaatacccttatttgcaattttaaggtactttttagagcatttaggggtattttatatatatttatttaatggctcttaaaacgcaaatatgagctaaatttaaaaattagaaaaacaaatctttaccttagatactaacaaattaagctcttatttaacactaaatacaaaataaagggtactacaaaatactaataccttaattactcctaaataaaagcacatattcaaaaaagactacttacttttatactgttagtcacaattgacaaatagcttaacctaatcaaaaatgattaacttaaatatttttaaacttttttatgaggaataattttggtcacacaagaaagtttaatcaaaaagcacctactcaaaattgagtaagtactattttcataatcattgtttaatcttcttctggcacatcatcaatgaatattggcgtagtgatttctatttcttgtttttcagtccacattctataacgtttgcctaataactctgctgcttttattctatcttttgcactaggtcgtattgtttggatttcttgcattccgtcgcccacatataccaatatttcttctttttcttcacctctaagcactcgtgttaaataacgcatgatctcatcagtttctgctatactttctttttgaataatttctaagttgtcatctatatatttatttatactcacattttccaacaattttatcgcattacctctcgcataacttacactataacccgcatttactgccgattgataagcgtttccagttcgaatgtactcatctgcgaattgtttttgttttagcgttaatgacttcattttatccctccttattttctaatttatctaataaaccattaaatagttgacggattctttctctacttaaattaagtatcttagcaacttcattcatagatttcccctcacatagtaagaaaaatatatagtattcccttctagttcctactgcataaatgagttgatctaattcattaaaaaacacttgatttccagtattttcatttaattcaaattgttctacttcatcattcagtgaaaagaaatcgtctacattggtagtttcatcatatatagttttacgattttcttttgagtaatcacgtataaactgtttaatagcttctctgttgtatctcatgcttaaatacttactttctgtttatttgaatgttttagcttgtataaatcacgttgtaggcgttctataaggtcataatctatgactgagccattagactgcatataatacatgatatctttttgttcacttggtgtatatttcttaataatctgttttagttgttgcatatttctatttgatttcgttttgaaacgctgcaatttctctttttcatcaattatactaatcactaacttttctaaaggataagaaatagatacaacgccatgaacatcatttgtagtcatatgtgacatatttaagtgatacatcatctctatttgcgtagtaatagctttaatcttagtgtttataaacttaggattatactctgttagtaaagcatactcagatattttagtttcatgataggataatgtgtgactaattcttttaaggatcatatatgcacctcacagataaaataagcccactataaaagtaggctacattgattaaatataaaatggtttacgactattgacgctacccataaactcagttggttgaatatgattttctctcgttaatctatctatataatggcttaaattacgttgattaagtagataactattgttatgttcttctagtttctgttctgcttgttttagttcttctttgagcttgttatagtgttgtaaatcgtctttatatgtttcaatatattcatcacttaatttatcggcttcttcttgcatgctgctacaatttttaataatgacttgtttcagtgattgcttcataacgcttaaacgttttacttttgctttatgtgtcgtttcttgtttatcaatcttagtatataatttatcagctttttcaacttggccacttactactaattcttgatagtctgcattaagttgatcaatcgtttctttttcgctatttacttcttgttctagtgcttgtatatccttttgatagctttcaatattctttttatgcacttcaatttgttttaatgttttcattggtagtcctcctatttaaataattcaacatgcttcgctatttcttcttggcgttggttagcgtctttaatagacatgatttgttgacgtttctcatgcttttctaaactacttaattctttcttttgttcttgtgtttgtgctttctcttttgcttctcgttcactatagttatataatgctaatctttgtgattctgatagttctaatgcttcacttaatttattcatttcatcattgttcatattgttttaacctcttttcgattggattatttgttagtattcttgttattgcttttaaatggttataggcttgttttctttgtttcaatggcaagcgataaagtgctgcgtcagttaatattttgagattataactatcaatattaaactcatgacgatctaacacataagataagagttcatcattgttcatctgttgaattaagtcaatgaatatccctatatctgtatttcgttcttcttcgtgttctttaatcaatcgcaactctttctcttgattgagtgttaagccataaccattattaatctttttcttttggtgtctttttcttatttcgtctttgtccactaagtacgcattaaatgactttttgttatgttcttcttgtcttttctctctttcagcttggacatagttatataaatcaattttaaagtgtctcacaagctcattatcacgcacctttgcatttctgatgtaattctttataaatatttgttcttgctttgtatagctctctaaaacagcgtataaatgatataggtttctattgctttttctgatgaatgcattcaatttcttttttttcttcaatgatgtacataactagactttctaaattttgcgattgatagtaaaccatttgagtgactggatcacataccatgtttggtgtattgcgttcatataatgtttcgatatagtcctctatcatctgctttttatcttcaataaatttaggattgtaaactgtgaataacgtatcatcactaatcatttcgatttcttcggcgtctgtgtcttgttgatacgcttgttttagacttgccatactatgtgttactcctttctaggaagcggaacgggtacaaagcccgttgccacttatgattattttttagttaatcggtagtctgttccttcaacttcaatcactgttgtattcatcatcattcttgaataaatctttgttagcattttatcggctgttagctctttgttagtgttattcgttgtgatgatattgtgcttatttactcttgcattaattacgctgaataacttacctttttcaaagtcagttatattaggtgataaatcatcaatgacaagcacatcacacgccttaatacgattaatcaactctgtttcagtatatttagctgttttgctcatagtatctctaaataaagcgataagttcggtaatatcgtaaaataatactgtgtagcccttttctttaatttctttgattgtagccattgctagtgctgatttacctaaaccaaaagagcctcttaacataattgattgcttattatctaaattaaagttctttgcataacgctgcatggtgtcctttgctttttgttggctttcatttctaggaatatatttatcgaaggtggcgctttgtaaatcgtcattcacttttgatttattaaacatacgatcaatttcatttcgttttatcttagctttatattcttttactttttgttcagccatttgctttgcttcacaatcgcaaccacttttgatttcttgtattgttccgtcagacttttcaatttcgtaatagtcataacgatttttacaaccttcacaaaataaattttcttcaaccttcaaaattttgccacgctttttattgttattcatcagtgtttcaagacttttcaaaatcgttcctccttacttaacttataaatattgttgtcgttctggtgagtttaaccaatcatcatcagtatcttttgtagattgctgtaccttactcttacttgcttcacgttgttttctacgtgcttctatatcgtcaatagacttaataccgtcttgataccaacttttaagaatactgttagcataactccacttacacacgttatttgttgctgcttcttttaatgcttcaataacgatattctcattaccgttgaaatcatttatccatgcattaatttgatcaataacgaatggttgaagtattccaaatccattttcttggtaaaagttgaatacattactataagaatgtgacggtagttgttgtttagtagtgcttgcactactactactgttatttttagtactatcaatattagttaagttattataagtactattattattagtagtgtgcgattttcctacgtaggtttttcctacattggtttttcctacataggaatttcgcatgtggtaaggttgttcaaatacttcatattcatattcttttaaccttcctttatcatcacgttttctttttcgttcaatatatccagttttttctaattctttaatgccactttttaaactacttagtccatcactagtgtgctttattaattcagtttcatatatttgccaatcatctggacggcttaaaagataaagtagtaaacctttagctttccaacttagattattattatgaataaaacctttatgaatagttacgaagttcccactctcttttttgactctatacgttgccaatcatctgccctcctttgctgctaatttttatcaatttataaaaagcctctttcaaataattgtgttcgtaacgttttaaaacgcttgtaactgatcatcaaatcattgcatgtttgtgtagcgctaggaataaagttatcccctacatgtgccatgtaatagcaatacaatgctttagcttcgatacttatatctttgctagacataacactttgcgtaatgacgccataacctttagaacacttgattttattagtcataaaatgctatcctttcagtagtttattagttttttaattagtcgttatcagttactttggtcggtgctgataacgtttcttttttatctaattctttaaatcgctctagtaaactatcaaattcttttaaatacatatgcagcaaatcagaatgttgagtatgttgaatacgattttcagaatatcccattaaataattagatatttctttttgcgtttgaatttctctttttatataaacatcatcaaagtgccacgcatgagtggtatataaatcttccaatttttcttttaagatttctaaatcacttaaaatgcttttttgttcccaattcattatttatttcctcctaatgctccttattgaagcggtttatatttcaaatactttctacttaaatctcttttccgtttcttaaatgctgtctgtatgctttataaagatatgaatgttctttatctctcatatcaaatttaaatgctgcaatcatacttccaaataagaaaaatactaacgcataatgtaattcagaatacatatttaggaatatggtaattacacatatataaataagttcatttataaatctaagcacttttaagcctccttttgattaaagccaacctttatgacgcttgcttaaatattctttaaaaccatcaatagagataactgtcatagtagatgacaaactgtaatataaatcttctacacctttgttatctttatcgtattctttgagaatacgattgaccgaactgtaagaaatcccaaacattttagcgatagcattaggttttgccattataggctttactattacttggttaggttcagtcactacgttttctttagttggtaaatcttgtaatttggtatgtgccattttttaagcctcctctttttctaatgtgttcagtagtttctctttattaataagaattttgccaccaattttagtatgtggaattacattttgcttaataagtctataagcatgtctttcgcttactcttaataaagcagcagtttcttttacagttaaaaacattttactcactccttttaattgacaaccatacaattcgttaaactgtataaacgtattataagtagtacattagatatttgtcaatatatatgtattaatttatttttttgtactaagtatatgtcaatttgagaaaaaagtaatctttagttgtctaaatgacttaatattgaaatatatatatggtattatcctactaggtgataaaatgataaaatttaatttaaaaagattacttgaacaaaaagagatctctcttactcaattacatagtcaaactggtatatctagaaactctttatctttattagcaaatggtaaaagtcaaggagttcaatttgatactcttgaaaaaataataaatgctttagatgtaggcattgaggatttatttgaattaacgttcaactatttatctattgaaattattgaaagtgagattttaaatcaaaataaattgaacgaatttagaagaccagaaagacctttagatgagcataatagggataaatttaaacaattcatgttaaaaacaatgaaatgtcaatttaatattgatggcgaaataactacatattatattccatatcgtattgttatatcttttaatccaacgcctaattttagaatagaagttgacttaaaagattatgatataaatggtcaattcaaatatttatttaataatctttatttttctgacttattattcgactattatgtttgtgataaaatagtagaatttgaaaaagattttttattcgaaatggctgaaaattataacgtttttttaggtagtttaattttatataatgatatgacttccgttaatattggacatgttatttcattaactaaaaaatttaaggttaataggcaagatataaattattctataaagaatttatcagaaattagtctttacgcttgcttttataactcaaaactagaatttaaaaataagaattttaatccatcaaaataaagagacacactcacatgtggtataaaaatttgattacgttgaatttatcaatgaaagtggtgtttctattgaacattgtctaatacaccatagaaaaatgaatataagggataataaaaattagggagcatacatatgaaaaaattattaggaacattatttgcagctacacttgtattaagtgcttgtagtcaagatgatactaaggaagatgaagataaaaaatcagaaagcactactgaaaagaaagctgacgataaaaaagataagaaaactaaagaggataaaaagtctaaagaagaaaagaaatctcaagaaaacgaagataacaagtctacacaagaagaaaactctactgaagaacaagacactcaagaaactactacaaatgaacaagctcaatctcaacaacaaacacaagaaactgcaactaaagagcagcagcaaacacaacaagttaataacaatcaaaatagcgaatatgataatgctagtggtctactaaatcaagatcaaatggaagctaatgctagggtagcaaaagaaaatggttatactggtattcctaacggtgatattggagctgctgaagaaatggaggcatatgcaaaacaaagatatgaagaggataaaaatattaatgatgaagatgtagaagaatttactccagaagaacaacaagctgctatggaacaacatgatagagaactagaacaagaaggtttaaaataacctattatttttgtgtatagcatacttatctattttaattgagaacaattatttatatggataatcagcatataaatattaaaaggatagattaatgttaatagcaataataatatcatcatttatttaataaagaattacttgtattttatctaccgttaattttaggagggataacatgtggcatgaaaaatttactaataaacatggtgaaactaaatatcgctattatgagaagtataaagatccactcacaaacaaatggcgacgtgttagcgtggtacttaataagaatggtaagcagtcacagaaagaggctcagaaacgcttaaatgagcgtatagaggaaaagctaaataataagacatctactacactcaagacgctaactttccatgctgcatgtgatgagtggtttgaaaactataaattagtatctggtgctaaacaatcaactataagagcaaaaacatacagacttgctcacatcaaagagcgaataaatgaggatattctagtcgataagatgaatgctcaagttattcaagattacataaatacatcaatgaaagaaaataatattaaacacattacaattaaggtcaatgtgagccttataaagagtgtattgaagtttgctcagcaaagacacaatatctcagatatatcatatatagataatgtgtcactacctaagaaagcaataactagagaagaaatcaaagctaaacgtgagaattacctagaaatgaatgaagtacataaactcattgatgaacttaaccataaggcaagcactagtaataaaggctatattaaacgctcatatatgatgactgcatacattactgagtttcaagtattgaacggtttaagaattggtgaattgttagcactccaacctgaaaacattgattttaagaataaaaagattgaaattgatggcacaatagcatggataactaaagatggtgtacgtggctttaaagatacaactaagactgaagcctcttatcgtactatatctattaccactagaagttgtgagatattgcgtaaggtaatgttggaaaataaaaaatcggctaagtgggatagtaattttaaagagagaaactttatatttacaaatagtaaaggcagtcctatgcctttatcatctattaatgctaacattaagaacgctgcaaagaatgtaggtattgaaaaagatatttcaactcacactatgcgtcacagtcacatatccctattatcacaattaggtgtgtcactgcgtgcaataatggatcgtgtaggccataaagattataaaacaactttacagatatatagtcatgttaccgaacaaatggataaagatatgatgagtaagttggaaaatattggaggttaaaatatgagaaaaagtttttatggtgatgagtctggctccataacaactagtgatatttttattaatagattttttgttataggttttgttggacttaatgatacagataaaatacaaaaaataaacagagattttagaaaattaaaagtaaaatacatagaaaaaaataacttagaccttgactataagaaagagattaaaggtagtcaaatgtctttagatatgcaaatatacattttagaaaaattatgtaaaaaacatgaattgactttacattatgcaataatcgataatcatgaattatatgaaaaattaagaaaacagccacatatcacctttaattacttgattaatacgtattttaaagataatcatagaactggcataactaaattaaaacttagattagatgatcgtaataaagcactcattgatctaaaagatttagagttttatttaaaaaatgaattatacgttaatactgatgttgaaactgttgaagttagttatcacttatctcataatgtgcctatgatacaaatagctgatattttctgtaatatgctttttcgttatgccacattttttatgaatgctaaaaaaagtaaagctaaaaagactaaacaagaatatattaatgcttttactcgtctaagtccctacatagaatgctttacttcttttcctaagtatcgctctagttttgtctgtccacataacaaaaatttgtaaaatatgtatttgtttgttacaatactattagtaatcttgtaattctctattaagtgtgattaaagttgcatttagcaacctaacataagctgcctgttgtggtagccacttttagagttaagattactttttttatgctcaaaaactaagtttcctcacatcatgcccttattctgcccttttttatgtataaataaatcaaaaacaacctataaacgctgatataccaacaattcataaaagttatgttgtttaaccttcggtaactcccacatgatttaatcctggacgtttttgttctaacactgacttatctgcttttaatgcattttttgcttcagttaattgagttaatgcttcttctacttttactttctcatttctgatttcttcaactgtcgcatcaccattatctattactttttgagcttctgaactaattcgttctgcctctgcttttttcgctctatagttatctgctgttgctggcgtcattcctggcgttggatcttgttctgctgttgctacatcaagttgacgttttgcttcaactaaagcactattatctgctttattttgtagtaatgaaattgcatgttgaattttcaatgagacatcattaatattatttgtcgcatttgcaacatcagtatttgttgctctatcatttgataacacttcattagcttttcttcgaactgcttcaatttcatcatgcaaatgctgcatttcattattatatgcattcacacttgatggtgttttaccattagtgtctccttgtgcgttaagtttaggtaaagcatttctaatgctcgatttatctgcatgggttctaattggtacatttacaatttctatacttccatctctataagtaatacgtgttggtactgtttgcgttgtatcactctgtaaatttgtaggtaaacttactccttcgtttacattagcatgatctttattatctacattaatcgcattattaagttcctcattactaactctttcacctggttctttgactatctcatgaatgataacatcatgatgttctggtcccacaattccaactgtattatgactgaaattatcgtcacttccagcaatagattctgtattaatcagtacatgcggttttaaagaattagctttaaatgtcactttacctgttctagaatcaagtgttacataatctagctgattattcatcgaccattgattttgattatttttagttacaattaattctctagattgttctgtactattaccaattttttctacatagctaattttaactttatctgtaggattttttgttgttgatgcattagcattgtttggaataacttcgaactcaccattttgtttaaatgcaaatgttgtgttagatggtgttgctggcttaactttataagtcgcacttatagcagcttcactagtcaattctccattcccggtcgttgattcggtgttaatcaacgtatcatttggaactgacattttgtcataaataatttcattaccatctggagaaactgataaaccaggcgtgtttatagaatcactcgcttttgtccatttgcctgtgttatttttgataaatgtgccaataacttgatttccttttttaacagtaattctatctggatttacaattatatttccagcattaacgcctaagtttttacctacccctggtgaaatgactacatcaccaacatcattttgtgtaacagttgctggatttggaactgcatttgtcactttaaatattgctggatcagaagtaaagaatacatggttttggttatctaatacttcaaatctcgcttcttttttaaaagcttgatttggatgtgctaaatttgaccattgttcgctatgagaagctgtggtgttttgagtccaaacaaaatggaaaccatctgtaggtaaaccattcgcattttctaatacgacataattattaatatttccatttccttcaaaacttgttcctacaatcgtactatactctgattttttaaatttatatttatattcatatacttttactggcacattatatacgtgattaataccgttataccttacttcagcagttaagctttgaacgccagcaatattattatttggagcattattatttttccaagtcactgtagccccattcatataattattttcaaatgtcacataatttgctgcgtcatcgccataagttaacgcgtgaccgaccacatcacgttgtggtgctttagcagtggctggtgcataaatggttactggaatagaaactgttctcgtttctccattactcaatgtgacaatggcgcgtttagttgtagtaccaattgtgtttttccattgattagcattctgttcccattctactcgtatgatatctgaattagagttaatgtaagttctaggattatttaaatcaatgttgtcccctttaacaaattttaatccgccgtctaccgcttcaagttgttttgttacaggtgaagatgcacttaaatctgattctattgattctgaacgtgttgagttcacaacagaaccactattattttgttcagtaatcgttacatgatcaaccgtgataattgatttagctttaatattaccaagtggtaatactcctggaattgtaatagacactgaaccatcacgatttctagtcatagttgtattactcatttctctaccatcttcagtatatagtttaacctgtgcattatttggaacattatttactttaatagattgtccagataaatcagctttatattttgtacttaaagtgtcgattgaaggcgtagttggtttcactttaaacaatacattaactgggtctacttgaccgttaggatatatcacgttaattgtttctgtaaaaatacctggactatttgataaaggttgtccagaaccaggcgcccaatcgaagttcgtacccgatggtaaataatttgcaataccttctacaaacgatcctacattagatgacaaaccttcatttgcagataagaaattaccatttattgttgtttgatatactctttttggtttcgctttaactactctatagtgtgcttctttttcaatgggtgttgtttcaccatcaaataagatgtttgctcttaaaatttgtgggacacctactgttgtagagttaatatctggtccattaccaatccaagtcacaatagcatctgtcaaaggttgatccttgtttataacgaagaagtcattattatttgttcctttaccacttgggaatggctgaccttgtactgtaaataattctattcctctgatattaggaatgacatgttttactggtacagtaatggatgttcttgaattatctgcataagtgatagtcacttcaacatttgcattattacctgaacgatgaacattactaatttccctacttcttatttcattactgccatctgtaacgtaatttctattggtaattgatttcgaaatatctaaactgttaaaaatagcttgtctatctgtctcagataaacttgcattgttactaatatttgctatacgtattggatgtgactcatcagcagttgtcatgacactatatttatcttttaatggtttgattaatacattaaatacagccgttgtttcgttatcactaccatctgttactttaacctttacttgtttagacattggagtagatacattaggggcaacaccacttaatgttgaatggtttaatacattcataggtatttgactgtcattaggtacagtaacatttttaataccaaagttatcagttaatgtaagtgtatttctgaaagtttctcctgaaaatacaacatgatcattataatcatctaatacaatatttggcgttactttatcagttggtacaaatacgatattaatcacattgtctgttgatgacattgattgtccaaggcgttcaatatagctttttgcaccataaggcgttaaatacaattgttgtttatctatcgcacccataattccattatcagtaccattttgtttaagtattttatctaaatgaaaaccagcagcaccattcatggctggaatatcaccactgatcactgtcgaattgctacttgtatgtctgtagtcactgcgtgcaacggcagagttgctatatccagtattgctgtcaacgatgtctaatacttgaataggttgaccatcatatgtaaatggatgttcttcatccgaatatatactattccctttagaatatcctacaggtttaaatccacgagctgagcctgattctgttaacattttttcttgaccttctatatggtttcttaaccctgcatgtttaggcgttgctcttaaaagtgataatacgtcattgcctgttattcttcttccagtcgttgcatcatatcgataaattattgttttaccatctggagaccactcaaatccaccatctgtgcctcttccattaagtttttgacttgtccaagtcacagtataatcattacgtaaatttatccattttaagaaatccatatgatcaaatgttgaaatgaattgttttgttaattcacctttagtaatcgtcactcttacacgacttggatgattacttaaaggttcatcgttttcaattctgatatcactatcatttagatttaattgcggattagcagctttaaaggcatttctaacttgtgtaatttcatcattacttaaatttttagttgttgaacggtaaacacgttgattttctgctaatgtattgacatcaactacgttaactttaattgtcaaacgttctgaactatggttgtaagcatttaatgcatctacgttataagtataaactcctgcatttagacgactcattgcttgaggtgatggtattgaactaccattaatagttgtaaatgcattcttaggaatatcttgtccattacttaatgagaaatattttcttaaatcaggtccaattgtatactcttgacctttagcaattgtaataaatgcttcttttgtatttgaactacctggttcagtatatattgatttacgttgtggtctatatgtaatcacttgagtcggatcaatgatacgagtagaaccatctttaaatgtcaagactactctaccatcattaccaaccatatacgggttaagtgtacttaaaaatgatgtcaaactactatttttagctttaagcgagttaatgatatcatttctttcgctttgcgaaatactattaggattacccactgttttcaattcttgctggctaaataactgaactggtttatcatctgataactttccaatatgaagatgatatggacttacattagtattattacctgctctatcatgtgttacaggttgaacaagaatatcactgttccatgttgcattattagaaatcgttccagtaatcactaaagtacctgcgtctccagaagtatctctattgaatactgcttgtaaaccactattttcagtgatagatgcatcttccacacctgaaccatatgcattgtcagaaacaggaattgaaatattaacgttatctccacgataatatttatcttgaaggcctcttacgtcaccaaaagttggcggtgtagtatctagtcctacattaatcgaattactaaagttggattgcactggatcttcatagtatgtaattgctctaataaccccattattaggtaaaggattagtataatcactttcttcaaatgtcaccgtgccatctaagtttgccatcttttctgcgagtacagtatagcctaaaggtgatgtgccaggacctgcaccatctgtaccacctgaaactaaacgtacttttgctctctcatcttgtggtacatgtgtcactgtaatagttggttttttaccacctttttgtcctaattgtgctgcaagtgttgaaataactggtggattgggtttggcaatgacttcaaagattttagtttcattaccgattctcgctgtcatcacatggcgtcctggcggtaattgaccaaccaatactttatttttctcaagttctgtattgggtctatctactgcatcttcaatttgtagagatggtggatatccagagatttcccatacatttgcagactcgttacttttaaattgaattcgaatattttgatgataatccttattattaccattagtcactgtattaagcatttgaccttcttgttgtaaaaagacagcatgatgtgcagcttgtgattcaggtgaattttctttattatcggttgcattatctgaatagaatccaatggattgttctaactttggtttgacaaataaatttacttttttgattgtttcaccattatgatatgcatcacttacattaaacccaacaaaaatttcaattggtcttcctgttctcgcagcctcttttaatttttcttcagaaaacatttcatgaatttcataagagttaagcggatttacaccaaaattacctctataacgatcagtaggcactctagggaataaacccattacatgatcactagggttacttagataacttgcaacatcttcagcatattcgtgtgtagcgaaatcgccatctaagtaatgttttttcattattctacgctctggcacatcataagctgattcaacatggtcaatatgcagtacgcgatcgataacatctacaattttagttttacgatcattatactgttctagcggctctaaatataattggttatagttgttgatttcattaaattcaatccctctaccacctgctgcataatataatctatcttgtgagctaccagacgttttaaattgaatggtataactatctgttcctctagcttgaaatgcatagatatgatcaataccttgattatgatctacttgcccagttaaataacgataaatatcgtctccagctactttaattttatttggaacaccttctctttcaaagaatgtaaatggttgattttcattaccacgtgcaaaatcccctaaattataaatatgattaactgaatcgttatagaactcacttctattcaaaggatttccttgtctgaaattatatgcactagaagtaataccaccagcagaatcccacattcttgataatgcttgatctctaccgtctccagtaccagatgatgatgtttcatgaccatttacatctgtggtagtaaaacgtactggtcccgttggcgtttgacctttaggtaaaccaaaccaaaataccatgccattacgtttaatatgatacttattaaaattaatcgtccataaatatccatcattttgtctaattgatgaaatttctgcaatacctctaacactagatggactcatatttcgataatgagaacgtgtagcgtaatatggtgcacttttattcgttgcatgtaaaaacgttcctgaccaataaccggaaccatcattttcattttctacataccattcttttttagcattattatacaaatctgaattcttttttacttttgagccaggttttggtctagagttatgaactactggtggtgtataagtattagcagtattgctagggggtctcgtcccaccttgtccacgtacaggacgtctacttgatcttacagcacgtgcttctctatttgctcttgtactgattgtacttacttgtcgttgtggtaatgaaccgattaaagcgttagcttgttctatttctttatataattcatttattaatgcttggtttgtattatcattagtactaaaaaagtcattaactttgtcaaatgttgctttaattttagcaacttttttattatcagattgttctctatcaatttttcgatattcagcgtaagaacggtcataagctgcttgaagtttatcagcatcaattgttgttaaagttgaagatactagtgtatcatctgatgcttctctatcttcgtaacgagtacgattacggttgtcatgactatgtccttcatttacctcggttacatttatatcatctaatttatttagttgagatttagcttcattgttttcttttaaatctgttgttgtatgagatgtatctttgttttcgttttgagatgaaaatgatgttaaatcatttgttaatgtatctgtagtctgaactttatttagagtttcattgttttctttttgactctcagatacaagtgaagctttaggttctgtgttagattgaacttgcttgttacttgtctcatttgaagtttgttcttggactctagcttttgcttgaatcacttgtccatctttttgtagttgttcactggcgtgtgcttgaggtgaacctaagaaaattaatgtcgcaataacagttgaaaaagcaccgactgtatatttgcggatactaaacttctgtaatttttctcgataattcacagtgattattcactcctattcttgatgtttattcttagctgtctaggtgtaaatgatgaaacatttttatttaaaaactatattataactcaatgtttcacaatcatttactatattgtactgaacaataggtgtatttgttcatttatatattatcatcattcattttatatgtgtatattattttatgaatattttattaaataatatatttaacttatatactagatgcacttcaaataattgttttagaatttatttagcttattaaaaattaaaaattcacttatattttttaatctagaagccatcacctagagatttttatttagaatatttacgtaaagcgtaatctagacataaaataacgaacttaaaagaaatttaatttaatctcatctattttctttaatattttttaaacattccaccagattttggctcggtagattgaaatccaaacttcttatataattgatcagctggataatctgcaatcagactgacatatgtccctttttctgcatgattttcaataaatgccatcacttgttttaagatttctttcccaaaaccttgtccttgataatatggatgcacagcaatatctataatctgaaatgcagttcccccatctccaatgactctacccatcccaatcaatgttgattcttcataaatagtaatattaaagcatgcatggggtaatcctttttgtgctgctgtttctgatttaggactcatacctgcttttgctcttaattcacaataatctttaacatttggtggatgatttgaataatgaatcattaaaacgtcctcctcttgtagtctctttatgcttaattataaaaaaagacacaataggtttgaatctattgtgtctcaaattattattttaatctctcggttcttttaaaatggcttgtcttagtaaaaagaaaagtaataataagccagcaagcattcctgtatgaccgatacctgcaaatccagcaaatgcttctggtgaaaaactttttccagtgacttggtaagtaccttttgtcagcatcattcccacagtaacaataacaccgatattgtatacaatgaagaaccaattaaataaataataactacttaacttaaatactttttcaagcggaagtaaaattaaaaacataaacatacctaatattaatgtatgtgtgtgaacaagagctagttgcgtatcgcccgtaaaatcatgtgctttcgttaactctctgtagtaaaatccacttacaagtccaataatcatatagactaaaaaagcgtataataatctgcgcataaaaaatcctcccttacttcaattattataatcgattatcttcgtctttaaagtgacaaaattttgtaatcaaatcatgttacgaaaaaatgacctctagcaagcactagaagtcactttattatatgtcttatttatttcttgcatgtttaaataatgcaactaaagataaaataatggcaacaagtgaaataatccacaatgcgatagaaccacctgaagatgattgacttctttcatcttttttagcgttgtcttctttaacagttacagcatttgcatttttttccacttccaatgttggagcaggatgttcactattcgctttgcctgtccattttaccttatctttattatcatatgtctgcacagctttaaatgaatatgtgccttcttctttaggacttgctacaagaagtgggaattcgataaattcattaggaccaatgcctttatctttcgctttccaagtgatttttgtgatattaccttttttgtctttatctaaactatatttatatccttctacaggttgaatatttgacacttgtacttcttttggaatatctaattcgactttttcagtatgatctttttgttcaacaggcactcgaacatccactttttcgtaagatccaggttcaactgcttttggatttatcgtcacatgtgcatcagcatatttaaataaacctaatgaaaagaagaacactaaacctgaagcaaataattttttaagcatattttacaatctccttttatggaatattaatttgactcataataacaccaacaagtattaaaataataccaatagaaacttctacgattaaagagactttattaattctataacgtttgtttaaggcgcgcgttgtttgcataaatcctaaagccatcatcattaatgttcctgcgattttaattattaataatattgtccatgtttgcatattagaccatattgataaaattttagtttcatcaatcgacattaatatacctgtaataatgataactacaacagcagctccattcactttaaataagatttcgcgtaataaatcaactgcatctcgttttttagtaaatactgaagaaaacaaataaattaatgcgcctagccataaactgataccagctaagtgtaatgttctaagtataattgaccaaacaggaacactttgagaccaagcatgtcctgacatacttaaagctaaaatcataattatcgaaatagcccaataccatgttcgttccatatttcttaatacaaataatccacttaaaataattaaagcaacagcgctcagtatatatgggaattgaattaagacacttggattaaatgttaaaactgaatccaaaatatcagatgatagagtcatcagataaagtacaagtgacataatatatgccatcatcatgatcaatgatacagcgacatgtctagggaaaatatcaaatgttgataaattatttctacgtgcaataccgtttaaccaatataaaccaactaaaataattgttgcgccttcagcgatatatctaaacacaccaaaccaaaatgcaggcgtttcatatgcaacaggagtagtatctacaccattggctgtttttttaccaactgaaaattcaaattgatcactaatttcatgaccatcagcagatacagtatgccatttaatttgttgtgtaccttcttttaattgcttgcctgagaaagataaagtatctgaatgtcctattgtactcggtttaacatcagcaactttctttcctttatcattatatatcgttatccctgaatattcggcatttactggctcattaaatgttaattcgattgtatctggttgttttgatacgagaccgttttgtgctggggttgttttttctaaagtagcgtgcgcagaagctatttttgtcatactcggcacgaataaaaataggaacatcatcaataacgctatagctactttagaacttcgctttaaaatgaccattgacgtcctcctataaaaaatactcatttaacaataataaagtaatataacttatttaacaataattattgtaatatgtcatcgtttatataaatttaaagcgagctaaataagagatcccatcccttatagctcgctttaatatcaaattattttattcttctactaacgcttgtgtgtccaaggttaactcattccttaaaacacatgcaataaacattgctaataatgaacaaattgtttcagtgattaataatgaccatacaacccctattaaaccaaacaacgcatttaatataaatagtactaggataatgtttcgtttcatatgctaacacactaacccaatattaataattatattccatttgagcctatctcatttagttagatatctaaataatataatacaccttttttcaaataatcaactgcgttttactcattgcattttttgaaaaatctttattaaaaatagctgcgccgtaatattcatgatcattaagtccttttttaatatctgattctttttttactttaatccatttaacagtatcagaatcactatccattaatttatcttcaattgttttaccaatatttactttattaccttggatatctatacctttatcattatttaccactgcaatcggtatttgttttggttttgggttaaatgcaggataaaacgctaaagagaatatcactaataataaaatagctgcaattggtgcgaaccatagtaacttacttttaaaaatattcatttctacttacctctctatatttattgaacaatgtgttgaatatttaatatcttgtaaattataatgagattatcacttcaatacaataatcaataataatcatatcgttaattaatgaacattatgactaatattgttaattaattataaaggattgatgcagaatgaaagaagatcggagagttcgtaagacgaggtcagcaattaagtcttcatttatcgaattattaaatgaaaaagaattagaaaaaattacaattcaagatattgcagatcgtgcagatattaatagaggtaccttttatttacattatgaagataaatatttattattatcagatatggaagatgaatttatttctcaaatgacgttcttaaatcatcttcataatattatggaaaaaaatccagaagatactgctaaaaattttattaatattattttaaaaaatatgcttcaacatatttcagaccatattacgttttatcaaacaatcttacaattaaatagaaagtcaaaacttgaagaaaaaatttattccttaatcggagaaaatatgcaaaaatatattagtacaaatcatgagattgaaggtataccagaaaaatattttcatagttatgttgctggtgcaacaatatctattgttaaattttgggtgaatgatccacaacgtctttcagttgaagatttaaccaatcatatttttaaaattatttataatggacctttaagaataatggttcagcatcaatataaaactttaaatattaacacagcgaaataaagactaagaaaggaactatcaattatgttgactgcatataaacactcaactactaacgaaatagttaaaacaaatataaaccaatctgcatcatggataaatgttgtcgaacctgatagagaagaaattgagcatttaattgaacagtacaatctgccagaagattttattcgtgaccctcttgatgcagatgaaagtgcacgtattgaatatgacgaagatactggctattctcttattattgtcgacttgcctattgtaagttctacgaatcgtcatgttctctcatttgttaccattcctctaggtattgtgattggaaatggtgtgatttttacaatttgtgatgctgaaaatgaatttcttgaaaattattcaagacaagataacgtaaatttaaaatttcatagtcgctttgctttagatattttacttactatttcaaatcactataacagaaacttgcgtcttttaaataaatcaagaatccgtattgaaagagatttgaaaaatagtattacgaataaacaactttatcgtttaatggaagtagaaaaaagtttggtttactttttagcagctttaaaagggaatgatacgattattaaaaaattattccgtttgcctgcaattaaacgttttgaagaagatgaagatttgttagaggacttagtcattgaaaataaccaagcgattgaaacaactgaattatacacaggtattttagaaagtatcacgtcttcgtattcttcattactttcaaatgaaatgaacaatattatgaagacattaactcttttcacggtattactgacactacctacccttgtctttagtttctttggtatgaacgttccattacctattgatgataagagttacgtttcgtggctggttatcgtaggaatctctttaatattagtcactattgtaagtattttcttatggcgtaagcaaaaactttaataaaaaagtaacccttgcaatgtatcgcaagggttacttttttattctgctgcagctttgtaagcttttcttcgtgataaaactaaagtgacaatcactgcaattataaacgcaataaacatacctatgaaataatgaagccaaccagcatgagctgggttaattgaaataaatccaggtaatcctgcagtacctaaagcaatggctttaactttgaaaaacgaaatgtaggctgagcctatagctgaacctgttattgcaccaataaatggatatcttaattttaagttaactccaaataaagcgggttcagtaatacctaaaagagctgagataccagctgctgaagccacacctttaagtttcttattatttttaataattaagaaagcagcaagcgctgccccaccttgtgctacatttgacattgtagcgattgggaaaataaatgatccacctgtttttgcttgatctgcaattaaagttgtttctactgcaataaaactatggtgcataccagtaatcacaattggagcataaaataatccaaagataaatccaccaattgcacctccaaattcatataaccatgttaaaccatctgataaccaataaccaagctgtctagtgataggtcctacaaataagaaagttaagaatgctgtactcaatattgcaagtaaaggcgttaataaattatccaatacagtaggaatgattttacgtaatcctttttcaatagttgctaagatataggctgccacaagcataggtaacacttgtccttgatatccaacttgattaatatgtaatccaaataaatcccaatgtggaatagccttacccgcttcaactgctttaggaaaatcatatgcactcattaatgaaggatgtactaaaatcattcctaacgctgcacctaaaaatggattgccgccgaatcgtttcgatgcactaaagccaattaaaataggtaatagtgtaaacggtgcattagcaaaaacattaatcatatctgctaatccagcgaattgactatgaacatctataaatgatttatgatgatagaataaatctggcgctgtaagtagattattaatacccattaataatccaccggcaacgatggctggtataattggtacgaatatatctgacaacatcttaacaaaacgttgtaaaggattcatatgcttcgacgatttgtcttttacatcagcagttgttgatggctcttttcctgttattttttctaactctgcaaatactttattgactgttcctgagccgataataatttgatattgtcctcctgtagaaaaggttcctttaactacatccatttcagataactttttttcatctataatactttcatcttttaatacaagtcttaatcttgtggcacaatgggccatagcatctaagttatcttctccgcctatcgcttctaatatatcttcagccgatttcttatagctcattctactaacctcctatatatgaaactcattttaatattcattatataattgtaatcggttccaaaaaacaaagcaatatcttataaatattttatataattaattttaatttatattttaatttaatgaaaaggtgaaagtaaaataaaattcaatgtctcacttctacaatttaacctcactttgtgttggatattagtttctttatgaacatctttgtactagagcgcctctactagagtttaaaacttgatctactgtattttcaatttaattactacttgctaatacatcaaaaaacctgggacaacgcatgttgtcccaggtttttttaatactaattctgacattcttaactttgaatatgtttcgtgatgtttaattaagtaaaagtatatttagatgttatgatgtaaaattgttacacattaaatagaaatttttggggagttataatgattctaaatatgatagttagctactgttaataccttttatatttgcatgcatcttttattctaagttgcttactctacggagtgatgtcattttctctatttaaaataccgtaatcgttcgtttcattaaactattgtatatcggttgctaatgctctaagatgttgtgtcttgatatacatttaaatagtgattttaaatatatggggctcacatcaaatatataagtaaattcattcttgatgctatatattcaaatgatgttgtatcgtgatgtatgtacagaattagtcatttttaatttcaagtgaatcattgtttaatagcttatatctcttcactcaaaatctatatttattatgcatttaaattcgtttcattgacctactaaaaattttcaatagtctcatgcgacattctaaaaaaaataataatattgtatatctataaaattgttaacgttttcacttaaaaataaacgaaatttttttatttttaactattaatatctcttttattttcatatataataactcttattattcaaacagacctaaatccccgcttacaaatactatactagatgaggagacttatttatgagcagtactctttttttacatgaaaatattacttctatgcctaggagaaacatcaaccatgtgcttatattattttctttaactaatgaattagaaatgacaatcaatggaaagtatcacccattatcaaatcatattgcaatcattaatcaaggtgatttatatcaaattaataaaggaagaaatctgattgagctcaaaataccaatggcttacttttatcttgaagactctgctttttttaattgccactttgatgcacatctcttacaatcaagtcattttatcaaatcaatcattttaaataatatagaacatatgtacaacacatctcatcatgatgacaaagttattccaaagatcatacaaactttttataaagaagcagttattagacatcctcatatatatattccaaagattcctgttgaacagcacatcttaattaatatacttacattcattcatgatcacatcacttccaatatttctctacaagatattgcagcacatgtacttatttctgagtcatattgttcaaatttatttgtacgtatattgaatattaattttaaagattattatacaagtttgaaaattaatcatgctattaggttactcatttgtacaaatgactctattacaagtatttctgaacaatccggttttagtagtcataccaattttactaatcaatttaaaaaatatcttaatttaagtccaaaacaatttcgttctcaactgaatcattctgatcctatatctgcgatacgactgaagagtgacattgaacctaagcattttgaattaatctctcaatttgaaacaactgaacaattatcaaccgatacaactatcattgatcttgagcaattagaagcccttcaacatactcaatcttcaaaggcatttattcattttaaaaatattaatgaattattccagtttgtttttaatgatcattatgatatcgatttatcttatttacctaaaccagccattttgattaatgatatgagtgatatgaatcaacattcaattaacagaaacgtactcaatcgctgcttcgaaaaattatttgaaaaaaatatcagtttagctgtcattatcaaaaataaatctgagttcactactttttacgatttaattatgacgtttctagaaaataatcaagattataaatggaataaaaaaagtgtacgatttatgctcgtatttgataccaagtcaatgactattcaagatattcatctatcatatttaaaacttagaaacaaaaatcgttcgattaaatatggagttttagtggaaggattattacatcagtacgaaaagttacaagaggtctatgatacaatgaagcgtcttaattttgattactattttgttgacattgaaaatattgatacgaaaaatatattaattgaatatcaacgcggatttactcatgcaaatactcatttcgaaaactacgttcattttataaagaattctaatataccttcgacacaatttgtctatagtagcttatcattacgttgctttaagtatacaaatgacggtagacatccacttcaactagcagatttagtttgtcatttaacggcgctattaaaatatggaggcggtatttgctatcacctttttgaagatgatccgatgtttattgcattatttaatcgacatgggagtttacttccaattatgcatctttatcaatttattgcagcatttatcgatgtgcctatccatatttcaaataattacttaatgagtcaaaaagatggaaattatcattttatcttatttaataaaattaatgatcgctatttgtctgacagtaaacagcattatcaaatactaaataaattaaacgaaaacagcttaatcatcgcaaatacattaaataaagaacatgggacgatccatcaattaatgtctcaagataatttacctgtatacattgaaaaaagtattattcatcagttagatagatgcaatcaacctaaaacagaactatttatacaagaagaaaccaatcatccatttaacataacgttgcatcatgatgaagtgaaatatatttatatcaaatctgtttaaatttaattttaaaaggatataaatacaataaggagatgattagtttggacaaacaaaaagtgactcaagcgattgagaaagttttaaatacttctaaaattggcgtattatcaactgcatataataataaaccgaatagcagatatatggtgttctataacgatggtcttaatttatatacaaaaacaagcaatgaaagttctaaagtaaaagaaattcaaagtaatccagaagcatatattttactaggatataatgaaacaacaaataatagttttgttgaaatagaagcaagtattgacattgtagaagatcagaaagtcattgattggttgtgggaaacacaagacaaaacattcttcgattctaaagaggattctaatttatgtgtgttaaaaataaatccaaaaacgattactttaatgaatgatgatgatattgatacaccaatcacaattgatctttaatttgattgttaataagagtagatagaatgtatcatgaattctatctactcttttttgcttatttataatgcttcatttatattagttgaagtacaattgaatttttgtgaaacttttattgcaatttaattctattttttgtataaataaattaatatatttaaggagagtcttaatgaagaacaaaaaaggtttagggctaggaattgctttaattgcaattatgttaattgttagcattattttagtcattgtaatgctaaatggtcaccaaaaagaatcctactatggctatatgaaagataatcacactattgataaaatggtaaatgaacaaactgaaaaagtagagaaaaatgttaaattaccttctaacactaatgtaaaagtaaaaaaaggcgattttgtctttttagtaaaagaaaaaggttctgattcattttctagagtatcaaaagtaaatcatgatgaagtgccacatggtctcatgatgaaaattcatgaaatgcatgatatgaaaggcatgtagcttttgatatattaggcagtataaagagcgagataacattcatttaaaatcagttatctcgctttttctttttgaataaaaaagcatcgcttatccaagcgacgctaaaaatgtcagatgtccttttttaaattgattctagatatttcttacctttttctttatcataaacatgttcccatttagagataactactgtagataatgcattaccaataacgttcacacatgtacgaaccatgtctaacaaacgatctacaccgataattaacgcaagaccttgagctggtaagcccattgcccccaatgttgttaataacactacgatagatactcctggcacacctgccatacctttagatgcaaccattaatgtcaccattaaaatgatttgttcagataatgataagtgaataccatacatttgagcaacaaataaagcggcgatagattgatataaggctgatccgtctaaattaaacgaatatccaattggtataacaaaagaagtcacttcttttggtgaaccaaatttctccattttattcatcattactggtaacactgcttcagaacttgaagtagagaatgcaagtaataattcatctttaagtattttaatgattgagaaaatactaattccacaaattcttgctacaatacccaaaacaacaataatgaagaaaatcatcgcaaacacaactactaaaacaagtttagctaatggaattaaagctgaagcaccgaatgtcataacagttgtacaaataaatgcaaatacaccaattggtgctaattttaagattttattaatcatccaaaatacggcttctaatgtaccgtttaagaaacctttaactggttcagctttttctccaatcgcagctaatcccaaaccaaagaatactgcgaagaaaataattggcaataactcacccttagttaaagcttcaaaaatattagttggtataatatttacgattgtatcaataaagtggttaccgtatgtagattgttctgcggcagacgcagttgattgatatttagtaatatcgcctttaggtaacttatcaggatctaatccaattcctggtttaaaaatattaccaataattaaacctaaaccgatggcgatggttgtaataatttcgaaataaagaattgatttccatccatagcttcctatttttttcgaatcccctaaattcgaaatagataaagcaagtgaacagaatacaattgggatgatgatcattttgattaaatttaagaaaacgtcaccgaaaggtttaatataatttgcaacacctgtttgtccaaataataataaaccaattactacacctagcactaatgcaattaatacttgcataggtaggctaacttttctcttgaacagagtcacgttgaaacccccttcttctgacatcgcttaattatatcaaattattcaaaattcggatataacaaattaaaaactattaaataatatacatatttaatttggcaaaaataattaattaaaaacagaaaagtgagaatatttttagaatatagatgttggaattcaatcactatctttaaccttctcaatgtaagagcggtttataaatgaatgacattactctaaaatcttttttaactaactcgtttacctttaccatttaacaaaaaatttcatttaaaaaaacaatatctatttttctatagatattgtttttttgagtagtaatcatcattaatatctctggttctacgtattgattatatattatggcttataattttggttgaaatagttatgttttgcacctttaatacttttcttggtttccgtatcaaatccttcaactaaaatacctttacgtgtaccaattggctgaatgatatatgttaaattaggttcgtctttaaacactacttgtttataataaacgcctcttttagcactatataatgttttttctgatttaattttatctttcaaatgtttttgttctatataattatctacaagttgcacatttttatgcccttgatacgctttcgttccaaagaagaacgcaatagctactacaagagaaatagctaatataataataattctaataatcttttgcttcttactcatcagagcactccttcatcctcttactcaataaaatagcttcttttatcatttaaataattatgaatgaaatagtaacttttttaaagtgatacctcttttttgtaacaaaatatactaataatttaatttagaatttgaaataaatcaacattctaaatttatatgtagatttagttaaatttgtttttaaatttattaaaaaacttatataatactctggatatagtcttgacaataggtattgttcatactatctttaaataagttgaggggggaaaaatatgtatgtaaaggacagttatttaagtaaacagttatgttttttactttatgttacttcaaaagaggtaattaaaaaatatactcactatctaaaagagtatgatttaacatacacaagttttatggttcttatggctattgaaaacgacgaaaaaataaatattaagtcccttggtcaacgtgtcttcttagattctggaactttaacgcctctcttaaaaaaattagagaaaaaaggttacgtacaacgcatgcgagaaaaagaagatgaacgtaatttacaaatttcattaactcaaaatggtagagacattaaaccagtattagagcaaatttctaatcaagtgtttaatgattttgatatttctgacgatgaagcggatggccttgctagtagcttaagacatattatttcagagaacttcggctctaaagctgaatagttaatacacatgacaaaagctaagtaattattgtgccttctttcttttattttttaactcatacataatattgacgtcttttgtcatgtttctttattccacatctttcactttttaattcttcaaactttcaaattgcttttactttacgtgtagtatctctatttatataatgatattgtaaaatttcaatatattttatgacatatcactctgaaaaggagatttcatatatgaataatagagagttttttgatcaagctatttttaaaaataatccaagagatgtatttcgtgatttaggtgaacaagtatttaaccaattttcaactaaaagcttcccaacaaatgtttacagtcaaaaaaatcaatatgttctagaagccgaattacctggcgtaaagaaacaagacattcatcttaaatatgaacatgctactttaacgattaaagtaattaaacaagtatctgagcaaactggtagtgttcaattaagtgaacgctcaagtggggaattggtaagacgctttgaattcgaagatattaataaagatcaaatcaaagcaagttatgaagatggtgttttagtggtgattttacctaagaagattaatgaagaagacgaaggtactacaattacagtagaataaataaaagaagttgagatataactctcagcaaaatagccagtaaatgagtgatgagacattcatttactggcttatttataattcttcgtatcgtattattgccttactctcttagagggcagtttcagcttgtgctttcccttcaacctctcatcaaacaaagtacgttgtattcatatttcattttacattagattattgaaaacatagatacttagcataatttaataaacaaacgtagtgctagtgcactacgttgtttatttattttgcgtattcttttttgtaaagatgacccattgtaataaaagcaagtattccaaatacagctagtaaaataaatgctaaatgacttgaacctgtcaatgaagtaacatacgtgataacaagtggtgggaagaaaccacctaatcctcccatcatagaaacaattccatttgcagtaccagattctttagcaaagtaagatggcacaagtttaaagataagtccatttcctaatccagcacaaatactaattgttaaacaacctatagtaaataaggcaatatgacttgaaatacctaaaataactgcaccgataatcatcacaacaaaatctatcatcaagactttaaccgcgttgaatttatctcctaaaatcccacccacaggtcgtaagaatgttgccaatgcgataaatactcctgatcgaatacctgcatctactttatctattccgaaattattaactaaatagttaggtaagaataaaccaaatgctacaaaagcaccaaatgtaataaagtaccataaactcaaataatatagtttgtagtttgaagataaatctttaacttgagcgcctaaaggcactttaactttaggttctttagcatctccaaggaaaaacattaatattgcaaaaatagcgataataataagataacttcttactgttgtttgccatcctacaatacctgcaataggaggtgctaagaatgatgaaattgctgtaccaatgttccccattccataaataccatttgctaatcctactttgtcttttgaaaaatatttaggaactgaagtgacacctacagagaaaatggctcctcctactcctaaaaaaaatccagacgccattaacatactaggcgattgagcttgtcctaagaagaaaataggaaataataatataataaaactacaaaagaatacccatttagcgccaataatatttgttaaataaccaaatggtacacgaagaatcgatcctaggataactggtatcgctaaaataattgataactgtcctggattaattttaatatcttgtgaaatgtatggcatcaatggagaaataatactccaagccatgaatccaactacaagacttaaagtttgtaacgtaagttgaaaaccacccttagttttattcattttttcaccttcatcaatgttttattttctattatcgataattaaatcacatatcaatatagccaatttgtgtgattaattactgattacatttaaattttaatcactttgtgaaaatatgaacataaggagtttcccttatactctctaataatccccctatatttaaataataagacaaagaaaaaccaacacatgaatatcatgtgttggtgaaatataatataagtgtcattatttaagttattcaatatatttaaaagtctaaaagtttctttttaagcgcatattctacaagctctggtttagattttaaatttaatttagtcataatatgcgttttatgtgcctcaactgttttaacggatacaaacaatttttcagcaatttctttatttccatatccctttgcaattaatggtaatatttctaattctcttttagaaagtattttgaaaggatcattggttgctttttcatcttgattagaaacatttacaaattcatttactaatgacgtcgttagtttcatatcaatatacgtttcacctttatacactgttcgtactgctaaaatcagttgttcatctggtgaattttttaaaatatatcctttagcaccatttcttaaaacatgaaatagatattcttcatcatcatacattgttaaaattaatatttttgtttcaggaaaactttcagaaattttgctagtagcaattaagccagactcaccaggtggcatacttaaatccataattaatacatccggtttgtattccatcactttctgatatgcttctactccatcagcagccgtagctacaacttccatatcttcttgaaagtttaatatcatagaaaaacctgttcttactactgcatgatcatctgcaattactattttcaattataagtcagtccctttacattctctagagtggtacttctaaagtgataatagttccttttcctaaatgtgtttctacattcacttttccgtttacaagctctgctctttcattcataccatacaatcctagtcctgtaccttgtggttgagaattcggatcaaaaccttgaccatgatcaatcacttcagctattaataaacgtccaacctcctggacaaagacatctaccgaacttacgcctgcatattttaatgcattaaataccgcttcctgtaccacacggtaaacaaccgtttctacttcactatcatatcttttatctttaatgttagattgatatacaatttgcataccataattattttcaaattgtttaaaatatgatttaaaagccgcttccaagcctaaatcatctagagatgagggtcttaattcaactgataaatgtctgatatcatcaatcaatttagacattaatccctcaatacgttgtgattgttggacaagttctgaggattctttttgatatttcagcaatctgagttcaacatcaatatttagcatttcttgtacaacactatcgtgtagttctctagaaatacgttttctttcattttcttgcgcggaaattgtttttctcatcatctgacgttgatacattttttcttgtctttcaatttgcggcgaaatatcttgaagtgtaaatgcatatatctcattatcttcatcaatcgcttgataagaagctgtaaatggtcgaactttatgatctactgttttcataaatacttgaaaattgatatcgtttggtttagatgtgtctaaataacaatttttgcaactttgaagttcaaattcatttgaatacccttcacaacgatcacaaatcgcatttgtcatcgcactataattattatcttttgaaataatttcttcagcggcgtcattcattgcaatgacttttccttctttatttacaaaaacaattttttcatttgtagtttcataatatttttttagtaagtcttccatttgcagattatataactctaacacatatatcacctagatttcttcattaaattcccacaaacggcctttaatatttaattgattaatcactttaggcaatgttttactacctctttgtcctaataataacacgcctgcaacatgctgttcataccataatggtatagcaacgagcgcgtttaagttttcactcatcaaaatagggtacttaattttttcttctggtgttattgttttggaaacattttctataaccattcgctttcctgttttcatgactgtcccagctaagcctctgccttttctcaaaacaatcaatttataacgactgtttaaattacctgaaacatattgccatttaataggtccagaaggttcgtggttttcatatagtgcaacagcagcaaaatcacagtttactttttttctaagtgtgtcaagttcctgctgaaaatgtaccggttcaaacaaaggttccggaatcatatatcgtactccttttatatttaatgtgcacgaggtgctttatgttttctatatacaatataacgtctatttgtatatgctaatggaatactccatacatgtacaagacgtgtaaatggccaacaagctaatattgtaaatcctaataagatatgaattttaaatgataatggaacgcctgtcattagtgctgcattgggtgagaatgtaaataagtgtctaaaccatatagaaatcgtttgacggtaatcaaagtcagttaccattgcattagtaactaaagttgagaaacatcccataaatataatcaatattaataagaaatttacgaaaatatcagaagctgaacttaactttctcacattactaatcgttaaacgtcttgctgttaaaagtaacattccaattagagtcattataccaaaaatactaccaatataaacagctccaaagtgatatgtactttcgcttatgccaagtccatctatccattttgctggaatagctaaccccaccacatgaccaaaaaatactggaataattcctaagtgaaataacagactgccccatttaagttgttttttttctaaaaactcactcgattttgcagtccatgaaaactgatcatatttatatcgagcaatatgaccaacgataaaaattgccacacataaatatgggtaaataatccaaagaaattgattaagcatgatgtgtcacctcttttggaatgtctaaacaagcttttaatgtttctcgtaatgcacgaatcacataagcgtaaggattattctccttagctaattgatttgccatttcatatgtaccatcttcaataatcataatcactaactcaatatttccttctgcacgaggatcattatgccaacttgctacatgtaaaaactgcaacatcaatggtagataatctgataattcattatctaccatttttaatccaaacatttcataaagtacttttagttttgcgagcatttgacctctttctttttgagtatcaaatttattgtaagtcatataaagtggtgatgttttattgaaatcaaatgtatccgtataaattgctttaatttcagataaagtaaattggtacataatttcacgatatttcattaaatctgaatatcctggatgcgaaggatgaatcgtttcttcaaatgtattaggatgaaatgttaatttttctggaaaattaagttgttgtgcaagatatccaaaactttcttgatagtatttaaattgtgttagattaatcacggaaaatacctccatagaaattctcattataaatctcttgaccagattttcctgacgttgaacctactggaacaccgcagccttcacaattatctccgaaatattcaccgccatatccttggctaccttgagcgtgatacgtatctaaataggtttctttatgtgaagatggtacaacaaatcgatcttcatatttagctaaacctaatagacgatacatttcttttgtttgaatttctgataaacctaaacgttctaatctagaagtatcaaatggtttgtttgtgacttgagcacgcatataacttctcatcattgccattttttgtaacgcttcttttactggctctactttacctgctgtaaataagtttgctaaatattcaataggtaaacgcatttcttcgatggccgggaaaatcatatctggattttgacctgaatttttaccttcaaaataactcataattggacttaaaggcgggcagtaccataccattggcattgttctaaattcaggatgtaatggaaatgccaatttatattcaatcgctaatttatacacaggtgaattttgagcagcttggatccattcataactgataccatctttttctgcttgttcaatcacttcttcatcaaatgggtttaagaagatatcaagttgtttttcatataaatcttgttcattttcagctgaagccgcttcgtgtacacgatcagcgtcatataataaaacgcctaaatatctcattcttcctgtacatgtttctgaacatacagttggcattcctgcttcaattcttgggaagcagaatgtacatttttcagctttatttgttttccagttgaaatatacttttttgtaaggacaacctgtcatacagtagcgccacccacgacatgcctcttgatcgactaaaacaataccatcttcatctcttttatacatagcccctgaaggacatgaagcgacacaactaggatttaagcaatgctcgcatagacgaggtaaatacatcataaatgtctcatcaaattggaatttgatatcttcttcaattctttgaatatttggatcttctggtcctgttacatgtccaccagctaaatcatcttcccagtttggtccccattcaagatttagtttatctcctgaaatcaatgaatgtgcttttgcaactggtgaatgtttaccttctttagctgtggttaaatgttcataattataagtccaaggttcataataatctttgattaacggcatatctggattatagaagattttacctaaggcaattttagaccacttactacctgatttaagttcaagtttaccttttttatttaatacccaaccacctttatagtgctcttgatcttcccaacgttttggatatcctacacctggttttgtttctacattattaaaccacatgtattctgcacccggtctatttgtccaagtatttttacatgtcacactacatgtatgacagccaatacatttatctaaattcaataccattgcaacttgcgctttaatcttcaagccaatttacctccttcatttttctaactgcgacgtacacatcacgttggtttccaattggtccatagtaattgaagtgataactaatttgcgcatatcctccaactaattgcgtaggttttaagtgaattcttgtaggtgcattatgtgatcccccacgagtatcagtaatctcagaacctggtgtttcaatgtgcttatcttgtgcgtgatacataaacatcgtacctttaggcatgcggtgtgacgttaccgctcttgcagtcacaacaccatttctgttataaacttcaagccaatcattatcattgataccatgttgctcagcatcttcattagacagccaaacaactggaccgcctctgaataaagtcaacatgcgttcattatcttgatatgttgaatgaatattccattttccatgaggtgttaaataacgtagaacaagtgcatcttgtccaccttttacctttttatctcttgcgccaaataccattggtggaagtgttggtttatatactggtaagctttcaccaaattgctggaatacttcgtgatcgatatagtaactttgtcttccagttagcgttctaaaaggtacaagtctttcaatatttgttgtaaatggagaataacgacgattatttttattagagcctgggaatactgctgttgggataacttctcttggttgagctgtaatatttaagaacgaaattttttcagatgcacgttcttttgaaatatccttcaattccattccagtttgattttctaaatcttcatatgatttttgagataatttaccattcgttgccgaagagatatttaaaattgcatcagctactttacgtgcagtatcaatacgtggtctatcatttctaacagaatgttcatcgtcatcattccacgtaccaatcatactttttagctcttcgtattcttctttaacgctaaaactaacgccatgtgcacctactttacctttctcaagtaaaggtcctaatgtaacatatttatcataaattttagtatagtcacgttctacaatagagaagttaggcatagttttacctggaataccttctacttcacctttagaccaatctttaacgataccgtattcagaacctagttcttgtttagagtcatgtgcaagtggtgtagttaccacatctttaaatgtacctggtaaataatctttagccatttctgaaattgctttactcaatgttttgtaaatgtcccagtcagaacgtgactcccataatggatcaattgctggattaaatggatgaataaatggatgcatgtcggttgaagataagtcatgtttttcataccaagttgctgctggcagcacaatatcagaatataaaggcgttgcagtcattctaaaatctaatgatacaagtaaatctaatttacctactgtatcttctctccatttaatttcctctggtttatcatcttcattcggttcagccattaatcctgaacgtgtaccaagtaaatgtttcataaagtactcttgacctttagctgaacttgaaattaagttagatctccaaacaaataatgttttaggatgattttttcttaaatctgggtcttcaatagcaaattctgtttctttatttttcactgattcaatcgcacgttttaaaatagcttcatttgaatcatcgcccgcatcttttgcttcttcaccaaataacaaactgtttttattaaattgtggatatgaaggtaaccaacctaaacgtgctgctgtcacattataatctgctggatgctgatgtttaatgttgttagcaagtggtgatttcaatttatctacattagattcttcatatttccattgatcagttgcaaaatagaaccaacttgtaccattttgtaaacgtggtggaccttgccaatctttagcgaaagctacagtattccatccttcaattggacgacatttttcttgcccaacatagtgagcccaacctccaccattaacaccttggcatccacataatagaactaaattcaatacagcacggtaaatggtgtcagagttgaaccagtggttaatcccagcacccataataatcatcgaacgtcctttagtatcaatagcattttgtgcaaattctcttgcgacttgtgtcactaattcttgtttaatgcctgtaacgttttcttgccatgcaggtgtatatttagattcactatcttcataagatttagcttctaactcatgaccaaatcgtttaataccatattgactagccattaaatcatatactgtagcaatacgtacttctttaccatctgctaatttaacttttttagttgggataggtcgttcgaaaataccgtctccttgactatcaaagtaagggaattgaatggtttgtaactcatattcttcttctgcaacagataaagctggatcaattttacttccatcttctgtttcaagttttaaattccattgtttgccttcttcccaacgttgacccattgtaccgtttggaaccacaagtttgtggctaatcgcatcgtgaatcactggtttccactcaccattttcactttttatacctaaatcgcttgcacgtaaaaatcgtcctgccttataaccattctcatcttcatccagcatcaatacaaatggcatatctgtatattgctttgcataattaacaaacatatcacttggtttatcttcataaaattcttgtaagatgacatgcgtcatagcttgagcaactgcggcatctgttcctggattaggtgctaaccaattatcagcaaatttaacattttctgcataatctggtgctacagaaaccacttttgcacctttataacgtacttcagtcataaaatgggcatcaggcgtacgagtaagtggaacgttagagccccacataatgatgtaagaagcattgtaccaatcacttgattcaggtacatcagtttgttcaccccaaatttgaggagatgcaggtggtaaatcagcataccaatcataaaaacttaacatttccccgcctaataaattaataaaacgcgcaccagatgcataactaatcatcgacattgctggaataggtgtaaaaccagcgattctatccggaccatcttttttaatggtataaagaatttgtgctgcgataatatctgttacatctttccaacttgcacgtacatgtccacctttaccacgtgcttctttatataatttagctttcttttcatcttcaacgatagatgcccatgcggcgatacgatttccattattgtcttcaagtgcttctgtccatagatctaatagtttacctctaatgtaagggtattttacacgaagtgggctgtattcataccatgaaaatgacgcgccacgtggacatccacgaggttcaaattcaggcatatctggaccacaacttggatagtcaatttgttgattctcccacgtaatcacaccatttttaacgaaaactttccacgaacatgatcctgtacagtttacgccatgtgtggttcttactactttatcgtgactccatctttcacgatacattttttcccattctctacttttactttctaaaactgaccaatttccattaaacgtttcagttggtttgaaaaagtttaatccgaattttcccatttatataaatcctcctacctgcaaaggtaatacgttacttatgtccaatgttatttaaagaaatttcatttaaattgtacattttttcacatggtttttatattagggaattacctatttcatataaaagaatccctaaaaaaagtgagataacacacgttttaaatatcgtgttatctcacttatgacattcgaagcgtaaagaactacacttcaatatatttaatattttggtgctgcgttatgatcgattcatataaatacttttgtgaagaatgataagtttcatcatattgaattaagcattttaaatactgttgagataagtcttctgcttttgaaagggctaagtctttattccctttaataacgtacaatgtttcatctattgtttgttttgagtgtataatcttttcgtcatccatatagttaatgatatggcctaatatacaaattcctggatcatgtttaatattaagcttagataattgatgttcaatagtgcttagtttaccaaccactatggtttcgttataacacgtagcattaaaaatgatagcaatatcataatcttctttagtatatcttctaatttgattaataatatcatttaatcgtttaattcccatataaattgccaaagtaccaccattagctaaattacgtatatccatgtcttgatcaatatcatctttaaaatgacctgtggaaaatgtaacacttggtgctactgagcgcatcgttaaacctaagtctaatgaagctaccgctgcactcgcagaagttaccccaggtacaatatcataagcaatctgatgttcttttaaaatgtctatttcttcagttactcggccaaacactgctgggtctccaccttttaaacgtacaacaattttatactttttcgctgctgctactatttttaaattgataccttcttgttgaatatgtttagtataaggtttttttccaacatctatgatttcagtagttggctttgcatattgtaatatcaatggattgacaagacgatcatataaaataacatctgcttgacgaattaatcgttctgcttgtttagttagcaaattaggattgccaggaccagctccaattaaatatacttttccaaattcacttttagtgactagagacatataaatacgtctccatcttgaatttcaacttgatatgtttcaacacaacctgtatcaggttcttgcacttcacccgtattcaaatcaattttttgatcgtggagtggacaataaacatattctccacttacagtaccttcagataacggtccttctttatgtggacacacattattaatagcatgcacttctccattttctgttaaaaatataccgatttgtttatctttaacgataacctttttaccaattaatggtgttaattcatccatagttgttactttaactttttccattacactcatcctcacactttctcgacttcaaatattttttgtgcttctttattttcaacaatagcttcccaaggttcttcttcaagtgcttgttttgcatccataattctatcaaaaagttctttttgacgttgttcatctaaaagcacttccttaacatgatcaaatcctagtcgtttaagccatggtgctgttcgttcagcatatattccagtctctctgtaatactgcataagcgcaccacaaagttgtaccacttgatcttctgtttcaacagtagtaagtaattgacctacagttacctctgtaccaccgttaccgccaatataaatttgatagccattttctactgaaatgacaccaaagtctttaacacctgattctacacagcttcttggacaaccagaaacacccattttaaatttatgaggtgtgtctatgtattcaaatgttttttctaatcgaatacctaaacgtgtcgtatattgtgtaccaaatcgacagaattctttaccaacacaacttttcacagaacgcgttttcttaccatatgcagaggcagagcgcatacctaaatctttccaaacttttggtaactcatcttttttaagaccatataaccctacacgctgagaccctgttactttaacaagaggcacgttatattttttcgctacttcacctaaacgaattaattggtcagcatctgtgacaccaccacgcatttgtggaatcactgagaaagtaccatcattttgaatatttgcatgataacgttcgttcgcaaatcttgatgctttttcatcttggtgttcatgaggatataccatatttagataatagttgatagctgggcgacattttggacaaccatttttatctttaaaatcaagtacgtgacgaacttcttttgatgtttttaaacctttagctctaatttgagtaacaatttcatcacgtgtcaaatcagtacatgcacaaataccagttggtttagcagctacaaattcatcacctaatgtacattttagtatttctccaatttgtcctttacacttaccacaagaatttcctgctttggttgtttttgtaacctcatctacagtagtcaacccttttgttgtaattgcgttgacaatcgtacctttatctacaccattacaaccacaaattgtttcatcatcaggcatgtctgctattgaagttccactttcttctccgcctttatgaagcagtgacactagtgtatagtcctctagtgattcatgttttttcatcatactataaaatcttgaaccatcatctgtatcaccatataaaacggcacctaccactcgaccatcacttagatagacttttttgtaaatattatctacactgttaaagatttcgataccgtgtacagtttcatcttcaacgatttgtcctgcactatataaatcacaacctgatacttttaaagacgtaaatgttgtagaacctttatatccttcagtctctttacctgttaaataatcagcaagcactttaccttgttcataaagaggtgcaactaaaccatatactttaccgttgtgttccgcgcattcacccatggcatagatatgttcatcagatgtttgcaagtaatcattaacaacgatacctcgattcacttctaatcccgcttcacgagctacttcggtaaatggacgtataccaacagccataacgactaaatccgtttctattactctaccatcagctagcttaatagcttctacatcatctgttcctataatttctttagaatttgcttgtagttcaatatgcatgccttgacgttctaaatcagcttttaacatatctccagctttacggtctaattgcatttccatcagccattctgctaagtgaagaactgttacatccataccttgatccattaatcctcttgcacattctaatccaagaagacctccaccaataacaatggcacgtttttttgttttagcaatttcaatcatacgctcagtatcttcaattgtgcgccaaccgatgacacttggtaattctgatccaggtataggtaaaacaaatgcctttgaacccgtcgcaaagatacagatatcataagctacagtgatacctttagatgtagtgacagttttggattgtctatctactttttcaactggatcatctacaattagttcaatatgatgttctttataccagtcataatcattcataatcgtttcttcaactgtcattttcttttgtaaaatgttggataacatgattcgattataattaggataaggttctttaccaataattgtaatgtcaaattgagaatctgaacgttctaaaatttcttcaattgttcttaaaccagccataccattaccaatcattacgagtttttgtttagccatatcaatgccccttttattacatttaattattattaaattcaaatagttttgcactcactattctttacaaggctattttataccatattcttttgaatttgtgattattttcacacttaaatgtaaaatcggggatttccctaataaaaaacatcttccattacatgagtgaggatttagcactcatataatgaaagatgtatgtagttactatactgttaattcttttaatcgctctcgaataatcgattttaaaatagggtcgaaattaatagacggagtcatgtgcaattcattagcaatatccatctctgatataagaccttttactttattaactaaacgtccatcatataaaaacattggaaccacaataagatgatgatattgtcttgaaagttgatctaaatcatttttaaacgtaatatctccatataacgtacggcaatatataggtttgtcttgctttaacttagtactcaattcttttagttcatcatgtgctttagtataagaaaagctaccatgtgcaatcaatacaactgccacatctgactctttattcatatccacatcattaatacgttgttctactaaatccaccatatatggatgcgtaccaagaggcgcactaatttcataggttatatttggatgtgcttgtttaatgttttttaacatctctggaatgtctacaatgtaatgcatggctgaaaatataagtaaaggtacaactttaaattgcgtttctcctttttctattaaattaataatcgtatgttcaacacttttttcttcactttcaataaaagcaagctcataagcgtaagtttcatcttgtaataaactatctataaattcaccgagtgctttattttgatctccttttctcatgccatgagctactagaatattcgcaaccaaatagtttcccccttattattttaatgttgattaaaataataagattttctgaatattaagtcaatatgttggggattaaaagagcgaaaatgtctctcgatatttccgctctttgatcgtcttactatgcttttatactgtctctttttccgtttaaataggcataaacaagtcctacaaaaatacctccaccaatatagttacctacaaaagcaaatacgatattttttagcacatctatccatgataatgcatcactattataaaaaatcattcctgcatataatccagcattaaatacaacgtgttcatatcccataaatacaaatactataacaccaacagcaatgaaaaatgcgcgagctaaaccttctttaaaaagcattgaaacataaataccaatattaataaagaagttacagaatatccctttgataagaatatttaaccaagttgattctaccgtttttaaatgtactgttttacttagacttgcaaccatttcaggtgtcatcacatgtgtacccttcattaataagaataaaataaacccacctataatatttccaataaaacaaaataagaatatgtataacatttttttaactgcaatgactttgtagtaccatccgacagttaaatacataaaattactagtaagtaattctgaattagttagaacaataagaactaaagctaaactaaatgagattgctcctaataaattaacaagtccatcatttgttcctgcaaactgtgttttgattgctaacataaatactgtaacaatagttaataaaaatcctgacatcattgactttagtaaatatcgtccaggtgtttgagttgccataacttctttcatttgtacctgtcttacagccgctttaataagatcttttgtagtatatgtatcttcaattgttgtatggttacttgtcatattccctctccttaattcatttataattttatattatatatagtgaagtgcattttgaatagagaagattaaaaaagagcaacatatggaggtttattttccatatcttgctcttgtcatgatattaatgtgctttttttaattttgaaaaataacgtaatcctgaagcaaaaataccatagcctaatgccgttcttaaaatatattttatgacgccattatttaaacactttgaattaattaataatgttggaattaaagtactaattgaaaataatcccagcacttttaaatatctttctttcatactatatcatcctcttttcaatattattataacttaaaagttcaatttaattttgacatcctcgtgacgatttattcattaagtaagacttctagttgatctaatgttgaattcatacctgcttctattcccatacctactgcttgttgagctgcttctttagttggaaacactgacgtagacgtaatagtagtcatttgtttattatctgagttaaaattgattgaaatatgcataccaggtaaacgcgtatctttttttccctcaggtgtagcaaaataatcaaagtattcaagatacttcggacgatccacttttcgatattctgttaatgtatagcttgtctgttctgaggtttctattgcaaagaaggcttccccgccttcttcagtattaaaacgatatacttttgtcttagcgccttgaggatgaaaccattgctcaaataacgatggatttgtataggcatcaaatacatcattgataggagctttaaatgttcttttaaaaattattttattttcttttacatcgattgacatcgttatctctcctaatttctaaaatggtgatttctataatttaacaactattatattttaagacaataaaaaaacaggcaaagttagaactctgcctgttttttaactttattattcttcaataggaaattctaaatcaaattccacatttaatgttttacctaataagaaaccaccagtttctaatggttggttaaatgtaacaccatatttttcacgatcaagttcaccagtaataactaaacctgctgtatttttattattaagtgggtttaagctaatacctttataatctaaatcaaatgtttctttttgtgtttgatctttaattgttacattaccagtaactgaacgatcatcaacactaataatttcaaatttaatttcaggatattgttcaacgtttaagaaatcttcatttttaagatgattatcacgatcttctactttagtatcaatagaattagcttgaacagtaaaagtgccttttaaagaacttaaatcatgaaagtcacctgtaatatctgcatcaaaatcgttaaaacgtccttttacattactaattacaaggtgttgtattgagaaatttacacctgaatgaattggatctaaattaaagttagccatttattttccctccaatagtgaaatgataaaaataatagtattcattttatctatcttccactttaatataattattatacttagtatattaaataaatctaatgaaaatgacaaactaaacaacttaattaaaataaattaattgttctgactttatttcttttatctttattccctatttttataaaaataatgattttgaatgtaatatttttaaatatttcataaactatataaaaacataattaaaagacctaatttaatatttaaacaacactaagttaggtcttttgtattatgctataaatattttttccattctttgactttataagggtcttctacttttttaccattgataaaaactgttggaacagattgaatatgattttcttttgttaactttttctgtttttctgcttccttccaagcatcactatttttagttttatattctttttttatgtgatctttttgtttttgagaaatatttaattggtcaatttctttatctagtaatgtttcagtaatccactgttttttttcatcttgttgatgagcatatatatttttttggaatgtaagatattcttttggtgcaatagcttgaatagcattccctgctctagagcccattaatgaatcttttccaagaaaacttgcattaataaattgatattccactttatttgtatcaatataatctttttttatgataggcatgacgttatcttcaatttttttgcaataaggacatttatagtctccatattctacaattaaaattttcccatttcttgtatgagctggggttgtttcttttttatttcgagagcaagcgacaacgataatgattaaacatatgatcgcagctccaataaaaatcaattttttcatacgtactccttaagatggtttcaattagttaagattttcttccttataatccgaatcatgtgtactaatatattgtttcgtatcaaagtgctctaaataggttgtcttcttatctttaaattgatatgtataataatgcatttcatcgttgttgcttaatggtctatatgctaatacaacatacttacctttttcatacacatatatattagcgtcttttttatcaaagtgttttaccacatcgccttgttcattcctagcaagtcgttcttgttttttatcttgtagttttacagctttatctattttattagcatattcatcattaccgcagcccgctagcaatatgacacatacacttaatgataaaatcaatcttttcaaatatgttcactcctactttttctaatctaacctaatataactcttactattatactatgcttatactgattatcatacagtggttttgcaatataaactagactattaaaaaatattatattttaagttttatagttatatattttaaaaaataattattatctaatactaaagtacgagtaaattaatttactaaatgtgtgtaataatagaactaatttgataaaatagtttagaattcttaaaaatacagaggagtagataatcatgaaattcgtaagtttaacacctgaagaatttgaaaaattcacatccgaacatttttctcactatacacaatctcgaatacacttggataatagaaatgagatgaaacatgatgtacatgttgtaggtgttaaagatgatagtggagatgtcattgctgcaacattaatgactgaagcacgcgcattaaaattttataaatatttttacacacatcgtggtccagtaatggattatagcaatatcaaactggttcacttctttttcaaatcactaacagaatatttaaaaaaacaaaattgtctatttgttttagtagatccatatattttagaaaacctacgtaatgcagatggagaaatcttaaaaagctacgataatcgtgcagtgattaaaacacttgaagacttaggatataaacatcaaggctggtctgtaggttatagtacaatgagtcaaattcgttggctgtctgtacttgatcttaaagataaaactgaggaacaattactaaaagaaatggactatcaaacacgtcgtaatattaaaaagacatatgagatgggcgtaaaagttaaaacattacctatggaagacacacatactttctttgaactgttccaaatggctgaagaaaaacatggctttaaatttagagatgagccttatttctatgaaatgcaaaaaacatataaagatcatgccatgctaaaattagcttatatcgatttaaaaaattatttgtctactctacaacataaacatgaggatttaacaaaacaacttactgaaattgaagaagctttaaaagaaagccctaactctaaaaagaacaaaaataaacgcaatcaacttcaacaacaatttgatagcaatgaacgtaaaataaaccaaacaaaagataaaattgcagcagaaggtgaagtattaaatctagcagctgcattatatatctacaatgaacatgaagtatattatttatctagtggttctaacccaaaatataatgaatatatgggagcctatcgtttacaatgggaaatgattaaatttgctaaagagcataacattgaccgttacaacttctatggtattactggagactttagtgaaaatgctgaagattatggtgttcaacagttcaaaaaaggctttaatgctggtgtttatgaatatattggtgacttcattaagccaattaaacctgttctttatcatactcaacaatggattaaaaatagaagataatcattgcattataagtatactttaaggtaggcatataactatgaaatacaatatgttttctataggggatacattcactagtaaacattacaaaataactgaggaagaaatattagagtttgctcatcaatttgatcctcaatatatgcatctagataagaaaaaagcaggtcaaggaatgtataatgggattatagcatcaggtatgcataccctttctctttcttttaaactttggattgaagaaaataaatatgaagaagacatcattgcagggactcatttaaataatgtaacctttattaaacctgtctatccaaatgataacttatatgtaaaagttaaagttttagataaaaaattgaaaaaacaatttggtagtttaaccgttgaaattatgacatttaatcaatatgagaataaagtacttcaatttgagcttactgttttactatcagtttaaaatataaatatttctaaaatctatttatgtgaagaaagaaagcattattcaataaaaagaatcgtcgttcaagatgaaacatctcaaacgacgattcttttttaattttcattaatcacatttaaaaaacgttttaattcatcagttttagggtgatcaaataattcttcaggagatccttcttcaccaatttcaccgtcatgaataaatacaactttattagatacttcttttgcaaaacgcattgcatgagtaactatcaccatcgtcatgccttcatttgctaattctttaataactttcaacacatcatttacaagttcagggtcaagtgcagatgtaggttcatcaaataacatcactttaggattcatcgctaaagctctcgcaatcgccacacgttgttgttgaccaccagagagtgcatgaggacgttgatctttaacatgtgtcaaacctactttttcaagtaagtctaatgctctatttttagcttctgatttactcattttctttacagttactaaaccttccatcacattttctaaagccgttttatgtggaaaaagattataactttggaataccatccctgattgtttacgtacttcaatttgagatttcttatctttagcagtatacgttttatcattcacagtaacgttgccttcagttggaatctctaacgcattaatcatacgcaataatgtagtcttacccgaaccggaacgaccaattaatgtgacaacttcacctttttttacattcaaatcaatacctttaattacttctttatcattaaaagatttatgaatattggataactcaatcatgccttataccctctttcaatatatgattcatagaagccttggatgactgaaataataaaacaaacaacccaatacatcacggctacgagaatataaattgtaaagtactcgtatgttgtagaagcaacttcttgcgctttacggaacatttcagctactaagataaatcctagtaatgatgtgtctttaattaatcctaagaatgtgttacctaaagctggaactgaaacacgaatcgcttgaggtaaaataatacgttgaatcgtttgacgataattcattccaatagagtatgccgcttctgtctggccttttggaatagaaataataccaccacggataatttcagatgcatatgcacctacatttaaagacaatccaataatcgctgaaacaacagaagacaatgtccattgttcgtctgcatttccagtaattagacgtccaagttctggaataccataaaagataataaagagttgtacaatcattggtgtgccacgaataatagatacatatacacgtgcaattcctcttaatactttactagatgaaatacgcattaacgccgtaaacaaagcgataatcaaacctaaaataaatgtcacaattgtaattggaatagagtattttactaaaccttccaacatgggtccaaatgcttgagttgctgcatctaatgcgtgttgttgttgactatttaggctcagaaacattttcaccgaaccatttcttaccaatttttgctagttcaccgttctctttaagttttttcagaccatcgttgaaatcagaaacaactttatcatcgacacttttagagaatgcaaatgctgatttattttgttctgcatcacctttaattgctttaattttagcattaggtttttgttttttataatctaaataagataagctatcattaaaagtaccatccacacgtttagataataataaatcgatagactggttgaaaccatctactttagtgatgttagcacctttatctttagcaagttttccgtagttagaagtaaatgtttgcgctaattttttacctttcacatcatcaaatgatttaatattcttctcatcatcacgaacaactaagacaccacttgaataagtgtaagggttagagaatttatatttttcttttctttctttattgatacccacttggtttgcaatgacatcaaaacgttttgcatctaaaccagcaaacattgaatcccaagatgtttcattaaatttaagtttatatccttcttctttcgcaacagctttaattacatcaatatcataaccagttaactgatcttttttgttgtgaaaagtaaaaggtgcataagtcccttcagttcctacacgtaatgtttttttatcactattactgctacttgattttgaatcactatttttgtcagatgaaccactattaccacatgcggctaatacaaaaataagtgtcaaagctacaaataaaagtcttttcattaataactcctccatattcctattaaattagtcagaataaattaattctaatctcatcactatgaatagtcaataactatttaaactattaaataaaatagaaggtttagatatgaggttaatgactttcttcatttaaatccttttttcgtttaagtaaaaaagttaataataaactaacgactgtgataatgactgaaaataaaaagccagaatgataaccatgtatcattgcgtctgtttgaatgtgtttcatcatctctgttttagccattccttgataatcactgagtgtcggtttaaaatgctgacttgctacacttaaaattgttactaaaccagctgtaccaatagaacccgctacttgttgaattgtatttgtcattgaagatccatgggcatttaattctggagtgagttggttcattgtatgcgtcattacaggcattaaccctaaagcaataccaatcatacgaatcgcataaatagttgctaaaacaattgttgacgtatgctcatccatcactacaaagtaggacgtcgtaatcgttacaataagcatacctatcattgaaagtactcgtgcgccaaacgtttcgtataaacgcccagatatgattgacatgattgccattacaattgctccgggtaacaatatcaaaccagaatcaacaggcgtacgttgcaacacattttgtacaaacataggtaataccgtttcagatccaatcatcgaaatcatcgttacagccataatagcaatacctactgtgaattgactatttttaaatactttaaaacttaataaaggagtttcaagtcgttcttgtctccaaataaataaaactacaaaaataatgcctaaaataatagtgctcagaacgactgggtcattccaacctttctgagaaatagaacttaccccatataacataccaccgaatccgagaatagataagataatggatagtatgtcaatgggcgcttttacttttactccaacgtttttaataaaaattaaagcaagtataaaggtcactgctgaaattggagctacaacataaaacaatgctctccaattaatgtattcaaccaaatatccagataatgtaggtccaatcgctggtgctaaaccaatcactaatccaaacatccccatatattttccacgttcgtgcggttcaaatatatctaatatcgtcgtcatcattagtggcatcataataccagaacctaatgcttggataattcttgcaattaataaagtagtgaaattagggctaaatcctcctagtaaagtgcctagaaagaatataataattccagttaagaagacttgtcttgttgtataacgttgaataataaatgcagataatggaataactactccatttgttagtaagaaggctgttgtgagccattgtacttgagaatattcaatatgaaaatctttcattattctcggtaatgctgtggtcaacaaggtttcatttaataaaccaaaaaagccacctaatagcatagtgaaaatcataattaactttttactatgcgacatggtatcatctccttattccaattttaaatcgtaataattactatttacataaaccatcttttcctttattctttataaaaaggaggactatttatgaaacaagatttacaaactgcacgtcgcaacttaaaaagttctaatattaaaacacgtaaacgtgcattaaagatgattaagcaatatcgacgttagttaaaaccgtttaactatttttataaacaatcttactccactacattaataaaagactaaagcacttctttaatgctttagccttttattgtatctactatattacaataaataaaaattcttgctcacacttttataaataataatgattagttacttttaaatcatcatctaattcataaattaacggtgcgccagttttaatttcatagcctataatgtcttcatcagatacgttttctaaatatttaattaatgctcgaatagagttaccatgtgctgctacaagtacagtatccccatctaataaatgttgtgaaatatgatcagtccaaattggaataacacgctctaatgttgtttttaaactttcagagtaaggcatcatacgatgatctaaatgacggtaacgacgatcatttaaataagattgacgttgttcttcagtttgtgctggcggtaatacatcataagaacgtctccattgatgaacttgttcttcaccaaattccttacgggcatcatctttatttaacccttgtaattttccatagtgtcgttcgttcaagcgccaacttttatgaacgggaatccattcttggtcagattcagctaataaatattgagtcgtttccaatgctcttgttaataaagaagtataagcaacatcaatttcaattttgttttcttttaattttttacctgaagtgatggcttcatttctcccttgttctgacagttgaacatcttcccaaccggtaaataaatttttcgcattccattcactttgtccatggcgacataaaattaattttggcataatataacactccttaggttaatagaaagttaatgagtataacgattgaattataaatactttcctcattatttaatttaatatctatttatctttacaccattattatagaactatttcactttttttcataataggactacttataatttaattcggaatatatgataaacggttgagatatttgttacttcgtgttcatatttgataattattcttgatatgacagtaacctatgtcattaaattaactgttatagtgaacataccgtagtcaacatctagatttattgggatgcaatgttttaatttgaacattaatatccaaatcacaaaggagttttttatcatgaaaaaatcaatttttgcattaatgaccatgctctcattaggtgccgctagtttagaaactggtcaggcacacgcagaagaggtatcaacatccccttctcaacaacatcaataccaatataatcaaagtcatacatctaatttaaatgcatcaagttcaaacacgacaacttctagtacttcaagtcgtacacaatcagtatatcaacgtttcttagctgctggaggcacagaagaaatgtgggagaaaattgtccttcctgaatccggcggtaaccctaatgcatcaaatggtcaataccatggattaggccaaactaaccaatcatgggggtatggatcagttgaaactcaaactaaaggcatgattcaatatgcaaaagaacgttatggatcaattggagcagcgatacgttttagagaatcaaatggttggtggtaaatcgaatcaaaaaagagcaggagtatactcccgctcttttttatttctcatctaatgtatttggttctggatgaacatatacagacgatataccgttattttctaaatgtgtttctactctatcgcaaatatcatgcgcttcttgtaatgataaatttgcatctactacaatcgttacatctaaaaaaatgctactgccgtgataacgtccttttacattttttacttctcttacatctgtaacttcttgaacaagatttcgatattcttctaaatcttgttccttaaatccatcactcaatgcaaaaattgaatctttaaatattccaaacccagtataaataattaaacatcctaatacagtggcaagtatcacatcaataataggtagaccaaattgtgtaaataataatccaatagcagtacccatactgactaaaccgtcagataaattatcttttgaggccgagtctaatgagctacttttagtttgttttgcaagcctatgattaatagcataaacaccaatcataatgacaccactcatcatactaataataatcgtaataaaatttggaatatggtgttcatttgtcaacattcgaggtgcattttcaatcactacttggatacctacaaacataataatgaatgatacgaaaagcgttgaaatattttcagatttcaaatgaccataaggatgatttttatcagctggcttaattgaaatctttaaccccacaataacagcgatagatacaacaatatcagtcatattgttcaatgcatctgctcttacagctgccgaatcgtacacatatccagcaatatattttgcaacagataaaacgatataaacaactaaacttaaataagcgcctctttgcgccaatttaagattttcgttttgggtcatatctagttaaccaccttaaacacttagtattactagtatgtactatcaaaatttgaattacaatatttttttatttctatcatttttataaaaataagctaattaattttttagtcaaacctaatttcctatttataaaaaaaagagctagaagtacacaattctagctcttttttaaattttagtcttttaaaatccatttagataatataaaagtaatcggaattgtaacgataagtcctacaaacggtgcaatttcagaagggaaattaaaccatcttacaaagatatataaaaacaaagattgcattcccatatttactacttgtgttaatggaaaacttaaaaatttcttaagggttggtttaactctataaacgaaataacaatttaaataataagaaataataaaacttactataaatccaataatatgactcaccatatagtgaatgtgtaataattttagtaaaatgagatacactaaataataatcaagtgtattaatcccacccactatgacgaatttaattatttcatagtgcgtttgttttaacttcatagttaatctcctctgtcttctattacattaatatcaaacggcaatattttaagttgtttattatttgaaatttgatagtactctttgaaattttccttttcgatttcttcagttggagtcatttcatagaaatatgtctcaaatggcaaatgttttacaataatttcatttctatgttgttgaatttgagtttgaatattatttaatctagcttcatatttaaaatgcacaatcgtaaaaatagcaataaatacgaataataaacatcctacacaaattttaagaatattatcatagctttgttttaaagtatgtaattcagtaactaaagtaatcaatatcacacaccacattatatatacaataaagaactgttgagacgttacctctgaaatgaaaaagataggtatagcacttaaaataatagaaataaaagcagctattaaaataatacgatagtagctatctgtaactataataaaactagccatacttatactgacgaaaaagctaaaacataataagaaattaattagaccataacttgtaatcaaagttgtttgattaaaattaaagggttcaaaaataaatatcttgtatataggcaatacaagtataccaatcattaatataaattgtctgattttagaaaacgtttgaaagcgagtattttttataagtaatccaattataacaatcgcaatcatagacactatgataatatgattaaaaaacatataacgtggaaggtcatttaatattgtaactcttaatttatgaacataacctaaaccatcaatgtgtgctctcattgcttgaatgtcacttagataattaatgtacgtttggttaatcaacattattaatgtaccacataatgataatagaaaccctattaataaattaaagttaattttacgttttaacacaaaataagcaattaatgtcgtgaataaagccaaattaacgaaaaaagttaatgattcagcaaataattgcccactgaaacaactgatccaaaataaaatgacattgtacatttttagttcatcttttataaataaaatttgacttataaaatacaaattatagagaacacatatcattccaaaagcataactaaaaaagtagccaaagcttccataactctctgaaaaaactgaattaggtataataagcaataacatagttgcaagcatgagatgacggattgaaaatgtttggcgtatcaatttgagtattaataaaataatgcttactgatattattgaatacataatcatacgtaatattaccgaacgcactgctacaagttcaattaaattactaatataacgtccattcaaattatcaaaatgatgataaaaggtacttatgccttgatgacttccaaaaaaccaatcgattccatgtaaaggaataattaaacctaagtaaccgtaaaataataataaccctatgacccagatgtaaaattcgtgttgtttaaagttagacatttacactactcctccactacaataatgttacattatagtgtttaatcaattctatttaattaaatatcattatatactttttttatattttaaacattaaatcattttaatttagttttttatttataattttaatcggaagtgatctcgttgaacataaacaaaatggttattgcgccagattcatttaaagagagtatgtctgctaaacaagctggattagctatagaacagggttttaaaaatatattcggtgatgcgcttaaaacagaggttatccctatggcagatggtggcgaaggtacaaccgaagctttaatagaagcattagatgcgacaattcatagcattaaagtacatgatccactttttagagaagtgactgcatcttatgctcgttcgagagataatcatgtggctattattgaaatggcagcagcttcaggattagatttaattcgtacagatgaacgtaatcctttaattactacaacatttggcgttggcgaattaattaaagatgctctaaaccataatgtgactaaaattatattaggcataggggggagtgcaacaaatgatggtggtagtggtatgctgaccgctcttggcgtaaaatttctaaactctgataatgaagaaattgaacttggtggtggcgctcttgctcatttaactcatatagatgcgtcaaatttagattatagattaaacgacgttacctttgaagtggcatgtgatgttacaaattctttattaggttctaatggtgcaacatatatttacggaccacaaaagggagcaactgaaaagatgataccaaagttggattccgcactcgcaaattatcatgatatgatagagaaagcatatcatatcagtgttaaagatatacctggtgctggagctgccggtggattaggagctggtattctcactttcttcaatgcgtcattatctaatggcatcgatattgtcttaaaagaaacgcaatttcttcaaagcattaaagatgccgatttagttattacaggagaaggaaaaatagatgtacaaacgatttatggtaaaacacctatcggagtggcaaaagcagccaaacaattcgacttacctgttattggtatatgcggtagtttaggaaaaaattatcaagccgtatatcaacatggaattgatactgtgtttagcattatagaaacgccatcagaactcccctatttattagaaaatggagaacgattcttaacacaaactgctgaaaatattgctcgattaattaagttaaatgattaaaaagaggtgaaatctatgaaacgtactgaaaaatacaaagattcatatcaatacgatgatcaatatcaacaacgtaatcaaaaaagtcgcgagtatcaacaacgtcaacagagacgtcaaagtgaagaaaattacagaagaaatgaacctcgtcaagagtatcatcatcaaaatcagggcgattatgatgaaaatgctaatcgttactataacgatcgtgactttagacgtgaacaattactagaagaagagaatgaaaaaaacaaaaaatcaaaacgttggttaatcgctattattgcaattcttcttttaattattggcatttttgcgactaaatcttatattgatcataaaaaggaatcggacaataaacaacatacgtataatgcaacaaatgatgtatctaaaaattatcaacaagaagttcaaaatcaaagcgataatatcaagaaacaagttgaagatgcaaaaaatgatattaaagataaaatagacactgaatcgcgtcttagacaaattcaatctcaaattgataaattaaaaaataatgagattactaaagaagactctaaattaactcaattttatcaagaccaagttaataaattaaaagaagcaaataatgcacaacaaaacaacgcaaatgaaaacaaagtgaatgcgctattagatgatgtcaataataaagtagatgatatcaagaaaaaactaaacagtattcttggtaataataattaatattcttatgtattgtgataaatttcagctctaaaaaaattgattaaatcaatctttttagagctttttatatttgaaattacatattttctcaaaaacctatataatgtacattgcaaatcttttcaaggagtacaattatgcataactcaacacatactaaattgccgatgctattactcattgttctaggaacaatgacagcatttggtccaatgattatagatatgtatttacccgctttaccagcagttcagcaacaatttaatacatcaacgtcaagcatacaacttaccctatcctttgcaatgattggcctagcacttggacagtttatattcggacctttatcagatgtattcggtcgaaaaaaaattgcactaataattcttagtgtattcgttttagcttcatgtggtgcgatatttattacaacatttccactatttttattgatacgtttggtacaaggattaactgccggaggtattattgttatcgctaaagctttcgcaggagattattaccaaggaaatactctagctaaatttcttgcttctcttatggttgtaaatggtatagtaactattttaatgccattacttggaggtttatcgctttctcttggctcatggagaattatctttgttattttaacagctattagcataatcatgttatgtggcgttactttcaatatgccgaccacacatcattctgagcatgttactgccaatttcaaacatatattttctgactttggacgtttgcttaaacgaccaagatttattattccaatgtttttacaaggattaacttatgttatgttatttagtttttcatctgcttctccgtttatcactcagaaaatataccatatgacgcctcaacaatttagcgtaatgattgcaatcaatggcattggtttaattgttgtgagtcaaatcgttgctttgcttgttgaacgtatacatcgttttaaaatcttaatttatttgactttcattcaacttattggtgtacttctcgttgtatttactttgatattacaaggtccattgtggctcttattagtcgctttctttttaaatgtttgtcctgtcacttcaatcggccccttaggattttcaatggctatggaagaacgtactggtggaagtggaaatgcttctagtttactaggtttattccaatttatccttggtggtctagtgtctcctttagttggtcttaaaggacagtataatgtaatgccttatctcacagtaattgttatcacagcaattctcatagttttacttcaatttttatattttaaaaaatatcaacgtatctaatatattcttatattaataaacgtaatctagcatccatttttaatataaacatcgactgctaatatgttaaaaaatatttgagacaattattatatctcaagtattttttaacattcacaaatttgtaatgacttttcaacaaatacatgacaacttattcttctctaattgaaaatgattattatttactataataaactatagttaaataaggaggatttatttatggtcactaaagattcaattgttgctaatgtcgttactgattttccattaagttcggatgttttcagaaaatacggaatagatttttgttgtggtggaaatatctcaattaaaaatgcagtaaaaaataaaaaagtaaatgtcgatacaattatagaagaaattaatcatttacctgtacattcaacaggaaatatcaacgttaaatatttagatgtcccttccttaattcaatatattcaatcacgttaccatgaaacaatgcatgaagaatttaaaaacctttcaccttatgtcactaaaattgcaaaagttcatggaccaaaccatccatatttacttcaattacaagagttatatcgccagtatcgtgatggtatgcttgaacatatggataaagaagataatcatgattttccattactcattaaaattgcacgtggtgaacaagttaagaatgcgcatcaggttattgaaagtttagttgaagatcatactcaaactggacatctattagaagaaatgagcgatttaacaaatcagtatcagccacctagtgaagcatgtaatacttggcgtttagtctacacacgccttgaacatttagaacgtgaaacacatgaacatgtacatcttgaaaatcacgtattatttaataaattttaatttgtattaacgataacatgcatcctagaaaaataagattgacttacttttttaacacaatcagattaaataagaagctatgacatcttaaggactaaacccatatctacagaatcaaaagaaagcaggtcctttaatgttatctatcggtataatgtgcaataaagatttttgacgcaataaacataacataaatgatattgttcatgccgcaaaataaaataatacttgggagtttgcatatattcatttttaaatgcataactcccaattttattttatattaactgttcaatctttctgttgcatattaaaaattagtatatgaataagatacattttaagcatgatatctttaatcacttttgggtttgaatttttaacatcaattactatatcaacattcttcttattgtcttaaatatgttgacccacattttgttaatacaaagaattcaaatgattatacgctactctaatcaaggtatataataaatttactttaaaacaatgttttactgacataaaggagaacgttaatgaataaaaaattattatcagttacgcctaaaagtcaactttttccaatccctatgattatgggttgtgaaggcgtttctgcagctatgttattacaatataatcatcataatattaaagctactgatattatgaaacattggcctacgcatccaaataatccctataaaggctatgttggtcaccatttacttgttaagtttggtcatcaccaaacgattttcccttctgcttatgttccatatttacaaacatttgattcacgtatcgtagatggcactggtacgaatttagaagaattagaaactgtgattgatcaaggacaaccgattcttatgtatcatacaagcttaggtcaaaaaccttcacgtaaaacgtttaaatttgataaccacacgcgtcagcttgtgtctaacattcacgttacattacttattggatatgacgacacacattactattatattgatcctttatggagtcactttttaagaaaaataattgtgcctgcattagtacctaatcgcttccagattataaaaattaaaaaagaattcatggagcgtagctttaacgcccctggtaaaaaatgtatctatgtaaaaccataaattaaaagagcaaaaagcgactgtcttctgaacgtcgtttcttgctcttttttattctattacaaagtctattaatgcatgattcatttctgaatatatatctgctgttcgccattctcttttataacctaaacaaggacataaaaaggttatattattttctactaaagatttacgaaaatgaacatgccccataatactgtatttaatcggaaactgttgatataatcggtcgaaatctgatgtacctataaatgcattgaaaaaatcaaaaatacgatgaggggtaggtactacaaatttagaatgtgtcacaatatgtgtcattaaaataatttgtttatcttgaagttgctccaatgcttgtttaacatgcttagccgcctttttggataaaatcgtatcatcttcatcccaatcgattttcactttatcttgccaagtggccccataatatttccctttttttaatcgagtttcttcaaactttttatcagcgtaactgtaatcataccaagcagtatggcctacaatagcccaattatcattaattacatatggatgatccaacaaacactctggctttgttctataaaaatcataaatatcttgagatgtcgttccatcctctgctttccaataatcatgatttcctggaacaaataatatgggaatatgtaaagcagtttttaaatctttaataaattgatagctatctctaaaataattcgaaatatctcctgcaattaatagtaagtcaatctctctatgttgaactactttaatcaatgtttctagatatacatttgattttagtttaggatgtctgtctatatgtagatcagaaatcgctccgattctcattcctctactcctctaatacatttttaaattttatctattatgccatagattattataaatataaattattctgtttttcatagttgtatacacacatttgtttttttgaaaattaagagtataataaaattaacttttaacaaagttacatatttaacaaaatttaaaaaagtaaacttttaaaaatctgaatattctaattaattacaaattgatcttcactcttttccactttgttaaacaagtttttaaaatttaaagaaagcgcttacgtaattatcgtgtggctttctgagggggaagtctatggcaagacagttagaaagagaattaagtaatagacacattcaattaattgcaattggtggtgctattggcacaggattatttttaggttctggacaaacgatttcgttaacagggccatccctactaatcacctatctaattattggtatagtgttatttgctttcatgagagcacttggagaattattacttagtaatacacgtttcaattcatttgtagatattgccaacgaatatttgggaccattcggtggttttgtcattggttggacatattggttatcttggattgtttcaagtatgtctgatttaacggcaatgggacaatattttagtttttggtttccaaacgttcctcactggctaactgtattatttatcgtactcttacttatttcatttaatatgcttggtgcaaaattatttggagagttagaattttggttctctattataaaaattattactattattgctatgattatcgttggcttagttatgattttcttttcatttaaaacgtcatatggacatgcgtcttttagtaatcttgtaaatcatggtggtatttttccaaatggaccagctggatttttaatgtcattccaaattgctgtctactcatttatcggtattgaactaataggtgttacagctggagaaactaaagatcctcgcacagtgattccaaaagcaattaataatgtacctgttagaattttattattctatgtgggaggcttacttgtgatcatgtcagtgattccttggaataagattaaccctgatgcaagtccatttgtaatgttatttagtatgattggcttaccttttgcagcaggacttgttaactttgtcgtattaacagcagccgcttctgcaacgaacagtggtatttattcaaatagtcgtattttatttggattatctaaacaaggactaggacccaaaatgttaagtaagacaaatcatcatagtgtgccttacttatcaatgcttgtatcttctgggacattacttttagccgcattattaaattttatctttccagatgcaattcaattatttatttatgtcactacactctcaactgtattatttatagttgtttggacaatgattattatttcttacattatatatgtacgaaaaaatcctgaagaacataaacacaataaatttaaacttctaggcggtaaagcactggcttatgttattcttgcatttttcttgtttgtatttgtgttattgttctttagtgctgatacgagagtagccatatttatttcaccagtttggtttatattcttattcttgttctataaaaagtataagaaaaatgctgaatatttagctgaaaaaacacgtcagcaacctcgagaatcaatcaatcattagatattttattaagcggaactgaattcagtttcgcttttctatgtcttaagaatgacatatactaaaatttcttattattttttaatcatggtaaaatattaagtatttaaaaaagaaaggagtcacaatacatatggaattgttagaagcttttttattatttatacttgccgttatcattagttctattatttatcatcgcttccccaacattccaacagctttcattcaaattgccttaggtgtagcgctattcatcttacccattccactacattttaaatttgaaccagaagtttttatgatggctgtcattgccccactcttatttgtggaagggacacatgtttctagagaaaagcttttagaataccgaaaacctgtcgtgcttatggccatgggattagtatttacaactgtgattggggttggctttttcattcattggatttggcctaatttaccgatgccagctgcttttgctattgcagctattttatgtccgacagatgcagttgctgtatcagccattactaaaggtaaagtattacccaaggggtctatggcaattttagaaggagagtctctattaaatgatgctgcaggtattatttcttttaaaattgcagtcactgctctggtaacaggtagtttttcagctatgaatgcaattggtcagtttttactctcaacatttcttggtattttagtaggtgcaataattggtgctttagtcgtcagtttacgtgtttacctcacgtctaataaaggtttaaaagatagtaatacattgactttcatccaattgcttactccttttgtcatttattttattgcagaagaagtccatgcttctgggattattgcagttgtggtagctgggttaattcatggtttagaacgagatcgtctcattcgtgcccaaactgaattacaaatgaactacaatcaaatttggaatacattaagttatgcattaaatggctttgtcttcgtcgttttaggatatattgtgccagaagttattttagaaattgtacgtaatgaaccacaaaatttagtttttctaattgtggtggcattcctcatagcatttgccatctatatctttagatttatttgggtctatgtttggttcaaagatttttactatccaaaaaatgttgaagcatatctcgatgaagaagaagaaacacaaccaccaaaacggagtcgttatgcatttattatgaccttgtgtggcattcatggaacgatttcattgtcaatggcgttaacattaccattcattattaacggcaatcaaaactttgatcatagaaatgatttactctttattgcttcaatgatggtacttatcagtttaatttttgcacaaatgatccttccattcattacgccatccgaacaacaatcacacttcaaaggtatgagttatcaatcagctaaaattttcatgattcaacatgttattcgcacattaaaagaaaaagcagatacacacaaagatattgattatcgacctattctgaatcaatattttaatgaattatcatttttaatcgacatggaaagtgatgataaaaatacgaaagaattacatcgattaagagacattgcagaagatgttgaaactgagacgcttcaacagttaattaaacaggagcgtattactaaaaaagatttaagtgattatcgcaaagtaatggaattaacacaatcatttagagaaatgtcttttattgagaaattgaatcgttttagtaagttaatcatacttagatttaaagcgcgaaaagattcacgtaaaagtgtgaatcaatcatcatttgaacaacaacgctatactgacagaaaagaattaagacataactttaaaaaagtacaacacatcatacgtattgttaatcgtcaggtgactttaagacttcaagaagaacaaaatagcacaaatgttctcgaagtcagtttaattatcaaccaatattatgcattatcacgtaagttaagacaacatcataatcgaaaacgtcaaagtgaggaaaataaattcatgtatgaattaaatactcaacaacaatatgatgccaaattagatgcattgtatactcaacgtcaaattttagatgaattgatttctagaaataaagttacaaatgaaattgccgcacaattacgtgaaaatattaactataatgaaattgtacttgccaaggaattaaatcattaatatatagaaagaactcaagagacctgtatctctcgagttctttttattttcttctacttttgtaatttataaggaaccgtcgctaaaataacatttttttgatagaataaatgcatttttaatcgcaaactcgtttgattgtgtaaaaagttatgccatggttttttaggaataaattcagtgacaaccactgtgatgacatagttttgatcattcgcttttttattaattttatcgataaatcgagaaatcggacgaatgacactgcgatattctgagtgtaacgtcactagtctaatatctggatattgtttattccatttttcaataaataaattatcagtttgatctccgaaagatacatgtacagcaatcacatcatctgcaatcatatgtgcataataaatagatttatttaatgctgtagtgatcgtattaacgggtacaatcgctagatttttatcgaccactggcatatcttgaacaattttagttgtgctaagttgctcagcaatatccttgtaatgtctattaatacgcgtaaatatatatacaacaatcggtaaaaaaattaagattggccatacttggttaaatttcgtaattaagaaaatcataaatacgataaaagtaatagtaccccctatagcatttgcaataagtttagtagaccatcctttttcacgaccacgaatccattttaaaaccattccatattgagctagtgtaaatggaataaacacacctactgcatataaaggaataagattttcagttttaccatggaaaaagataataagcaacattgcacaaatgcctaatgtaataattgaatttgaataacctaaacggtctcctcttacgttaaacatacgtggcatatatttatcttttgacatacttgcagctaacattggaaaagctgtgaatccagtattagctgcaaggacaagaatcatgacagtcgttacttgtacaaaataatatcctacattatgccctaaaatattcattgcaagttgagataatacagttgtttcagtctgtggcataataccataccaatatgctaatcccacaatacctacaagtaagaaagctaatatcattcccatagtaattaacgttttaactgcatttttagatccaggatctttaaagtttgttactgcattcgaaatggcttctacacctgttagagatgatgcacctgaagaaaatgctttaagtaataaaaataatgtgacacctggcactgcggttcctactgtcgcctgcatatgaggttctgcttgtccggttgccacttgccatgttccaataacaatcatgactattaatccaattataaataaataaactggataagagagcacagttgctgactctgttaaaccacgtaaattcattattagaataaatagtaccaataaacatgcaatgaatactttatagtgatataaccctggaaatgctgcaacaaaagcatccgcacctgatgaaatgcttactgcgacggttaaaatatagtctactaataaagagccacctgcaagcaatccccatttttctcctaaatttgttttagaaaccatatacgctcctccgcctttaggataagcatatataatttgacgatatgatagaatcaatgctgcaagtagcactaaaacagcagccgcaataggtaatgtataccaagatgcaatagcgccaaccatagataaagtaattaaaatctgttctggaccataagctactgaagataatgcgtcagaagataaaattgctaaagccttaaagttacttattttttcattttttaagtctctatttttttttggcttaccaataataagtcttttaaattgagtgaacataatccatccttacctctttttatattcatttttaatggataaaatatactcctatttagtgaaaaagtatacatttacgtggaaataatatagtataaattacattttaagtaactttttacaattatatttttagagtatatctttttttaatagttataaagaggtatcaacagtatttaatatttgtatagagcggtttaagtttaaacttgctatactatttttagaggtttaattttaaggagtattaagtaaggaagtaagggaaaatgagaaaaaattttatcatgattgggatgattttattagtaggaatcattattctttccatagctattaaattaaaacctagttattcaatgtttagtccatcgtcacaaagttatatcgataacatgattgttaataaaatgaaagacgatcatattccaggaatgtccattcttattgtaaaaaataataagacgattcttaataaaggctatggtttttcaaatattaaaaagaaatccaaagtcacaccaaatacgcgttttgaaattgcttcaaataccaaagcatttacgggttatgcaataatgcaacttgttgaggcacataaaatcaatctcaatgataaagtcagtcattatattccaggtttctatatgaaatataatcataaaaaagtagatatcacagtagatcaattgattgctcaaacaagtggtatttcaggagacatcacaaatgatgacaaaatcacaaaagacacaaacagtctagaaggccttgttcatagtatcaaaggacgtaacttagatgctaaacctggcaagcaatttgaatattccaatatgaattatgatattttaggtttgattgttcaaaaggcttcacatcaatcatatgcgacttacttaaacacacatcttttcactccattacatatgacacaatcaactgtaaaggaaagtaatatgaaaaagaacaatgatgctcaagggtatgtaatcaaaaaaggaaaagcttatgctgatagtcctgaatttaatttaggagataatccagctgcctatatgatgactaacacgaaagatttagcctcttggttgaagtttcaacttaatccgccaaaaaaggtagcatcattagttcaactaacacatcaacctaaagttaaagcaatagataattctcaagaagttcactatgcaacaggttggtttattgatgataatcattcagaaacaattgtatatcatcctggcacacttgaaaactattcttcatatattattttaaatccaaaaaaagattatggcattgtagtccttgctaatagctattcaaaaaatgtagccgaacttgcacagcatctcaatacacaaatgagtaatggacaacatattaaaacgttacaatatcttattaatcagtggaatatcctatttatcatcatcactattattttgctaatagctgtagcaagtgtttttctaataatctatcgtttaatttttaaatttaagtctattcattttaaaacgatgtctcgtggattactcatcaaaataagtatgatgctgttaacttttacacttattttagcgattctccacttacttccaacactcttattatcaaattctgattggcgttttatgatgtcatggttaccattacaagcgaaaataacattacttagcttcgtcttattactgacaagtctatggagttattttatcctaaacatcataacgcgatccaaacgaccaatataatctattaaaacatgtatttcttcttttcttcattattatgttaagcttatatcactaagactaagattattaaagaccagtgtataggagtttaaatatgaaaaagaaatggttcttattaccgatggccttaataatgcttgcaggttgtgactattctcataaagaagaacaacacggcctattttatactatatttgtaaaaccgatggatgctttacttcatttcttaggacatacattcaatgaaaactatggtttagctattatcgtcattgtatttatattgcgtttaatactgatgccactcatgtgtattcaagtaaaaaatattcatgttattcgtggcaaaacagatgtcgtaaaaccagaaattaataaaatccaagaaaaaattaaagaagctcaatcgcctgaagaacgacgtgcagcaaataaattattaatgaaaaaatataatgagtatggaatcaatccttttaaaaatttaattggcacatttccaattttaattcaaattccaattcttctcggattatacacatcaattaaatatccaacaagtggtggtattactcagcatcctcattttttatggtttaatttaatgcatactgacataatcatgaccatcattgcagctgtgatgtattttatacaacctcttgtcaactcaattcattatcctaaaaatgaacgtcgatcttattatgtcatgatggtcttatcccctttatttattacttatgcatcattacattcagcatcagcgttaagtgtatattgggctataagtgcaacgtttttaattattcaaatgcattttgctcatagccattatgcgaaagtgggtaaaattgagggagaaaaattaagacaacgcatagaaacaaagcgtcaaactacttcagaaacatcctcaagcacttctaaccattgataagatcaattatatcaaaaaggaagcgcgtgactatcacgcgcttccttttttatttatcgatgactatttcgtattaaatcaatcgtattcatccaaacaatatgacctaataattctgaaatgcgttcttctttaggtaaatctttaacttgtggtgttagatttaatttaggcagtatatattcatgaaaagcaatatgaatcaaaataccgaagaatgtacctcttaatgtcgccacttttggacacttttcagcaagtaatccatataccatagcatttgcaattgaaaagccataatgaatacccatgacagttataggtatatcgttctcgttataacggtacgtagcatgtttaacattgtcaggtaaattcaatttatgcagtaatgtcattggtggtggttcttcttcacgttgtggcgttctaggagggatgagtgcttcccatcccattttaactgcaccacttaataatccgccaataacgcccgtcatgataactcttttcgttgattgtttcattaatttcacaactccttatctcactatatattatatttacccttaatgattacaaattaaaaagtgagttaatcacttttaactcacttttgcattctatttacttagcttgacgttgctcttctttggcatgtaccatgttcgctacaaattgattaattggcgcatcgatatgatgttctgaacctaagcgagccactgctccgttaatgtaatcaatttcagtacgtcgattattattaatcaaatcttgatacattgatgggaaatgtggacctactttatcatttaaatcgacaagatagtgatagacttcatctgcatttaaatgtacaccatcaacagtagcaacttctactatctctttagtaatgtcatatacaagttttcttgcatattcactttcatttaatgttgataaacgacattctaaaatggtacatagcgcatttgctgtcccatttacacaaatcttcttccaaatagattgttgcaagtcttcacttttatgtggattgagcttcgcttgttctaatagattatatatcacttcaacattattctgtccctctggcacaagagaacctatctctactggaccactacccattaaatgagtatgtccaggtgattctaagccggccgtccacgtagttacaccacgaacaatacgtgatttatctacataatttacaatacgttcttcatgttttagaccattcattgtacaaaccataattgttgtatcatgaatatgtggctggatatgtgttagcatgctctcaagttgcatagcttttgtaaataaaaatacaatatcaaattgaagatcacttggtatttttgtatcttgatacataggaatatttaaatgatagtcttctccatttatatcaatatgtaaaccttcatgttttacagctgttgcttgtggctcccaaccatcaatgagtgtcacatcattaccttggcgatataacattgcaccgaaaccacttcccaacgctcctgaaccagcaattgctattttcataatattcgactccttcttttaatattatttttaaaatactactttaataaagtatcgtcaataatataaacagaatattctaaataatttgataaatttagaactttttttatttttcaataattgacgtagaagtcattatccccctgtataaggactcattattatgtttacatttattcttttattcaatataaaaaatctgaggtactctattcgcacctcagatttaaattttattaatatccagttttaattaagcacgtttagctttatttggaattaagaagaaaatgacaaagaaagcagttaaaacgatgatggcattaaagagtacgcccgctaaaccaccaagttctaaattcattttcgctgcacaaacaccataaatcgtacttgataaagctacaccaaatgcatttcctagtgatgaagccattttatacaatccagaggcaacacccactttatcatctggcgcttgatcaactgctgtatctgtagatggtgtggcatacataccaagcccaataccaaatagtaggtaaccaataatacttgaaataatataaaacaaattaggtaagaaggttagtgataaaagtagtaaccctaaaaatgtaaatccactacctataagcaatggctttttagcacctaatttttgtaatagtttttcacctacacgaatcattacaagcactgctactaaataagtgatagagattaaacctgcttgtaatgaagtgaaacctaaatgactttggtaatatgtatttactacgataagcgtaccacctgctactccatttagcatgaagtttgaaagtgtagcaccactatatcctttattcttaaataaactaaaatcaacaagtgggttctcagttttaaattcacgaagaacaaagaatataccagcaattaaaaatattccaaataacgatagaatgacaggtgataataatccacgatcagaagcttgtgttaccatcacattgacacttaataatgtaataactaataaaatcaaacctataaaatcaaattttgaaccgctattgtctgtatccgtatctggttcattttttgtttctggcgtgtgtttaattaagaaaaatgaaagtattgacaaagcaatagaaataataaaaatccattgccatcctattgttgaagcgataaatccaccgaacaatgaacatattccacttccgccccatgagccaatagaccaaaaacttaatgcacgttgtctttcttttcctatgtaatattcattaattatcgcaagagttgatggcataatgaatgcacctgataaaccttgcaaagcacgtccaatcagtaataaccatggaactggtgtaataatcaataataatgaaccaatgatatttaagcctagtcccaaataagtcattttgacgcgaccaaatttatcagcaacatctccagcacctacaataaacaaaccagaaaataaggcagataagctcactgcaatattaatagtacccaaatcggtattaaatgatgattgtagtgttggcacaatattaagtaacgattgcgcaaacaaccaaaatgttaatacactaataataattccaacgagtaaccgattatctcccttaaattcttttgaagactccattataaaaaaattcctcctactttgcccaaaaactatataattttaaactacattaaaattttatcatagcttactataatgggatataaaaatctttttttctttttaaatattattttccaaaataaattatcatttaatataaattaagtgctaagtatttataagtaaacattttaaactatcaactttaaattttccatactataataaaaagtgtagtaaaaattttgaattttattaatatacttaataggtgcaaaaatgtttaatttatttattttattacttgaacgtgtaggcttaattattattattgcttacattttaatgaatattaatcacttcaagacgattatgagtgcacgtgaaaaattacgtgctcaaatagaactcaccatcttattttcattattcgcaattatttctaactttactggaattgaaattgagcatggcaaaattatttctagtaatatttactatcatctaaataatgaaacgtcacttgcgaatacacgggtattaacgattggaatgtctggtttaattggtggtccttttgtagcgattatcgttggtattatctcgggcttatcacgaatcctcattggtggcgcaaatgcttatatttacctattttcatcagtcatcattgcattaatttctggattttatggatatcgcaccatgagacataatcgctatccaactgttttaataggtgccatgattggattaataaacgaaagtattcagatggcttgtattttaatttttgctgatgatgtttctaatgcttgggcattggtaaaatttattgctttaccgatgatattaattaatagtattggaactgcgttatttttatctattattctgtctactttaaaacaagaagagcaaacacgtgcaattcaaactcatgacgtccttgaattagcaaacaaaacactaccttattttcgttcaggattaaatgaaaaatctgctcgtcctgtagctgaaattatactgaggctaatgaaagtatctgctgtggcaattaccaataaaaccgatattttaacacacgtaggcgcgggtagtgatcatcatgtcgctaaaaaagaaatcattactaatttatctaaagaagtcatacgtacaggccaattaaaagaagccaattcaaaagaggacattggatgtaataatccgaattgtccgcttcgagaagctatcgttgtgcccttaatgacgaatggaaacgtcgcaggtactttaaaattttattttacagactataaccatattacgacatcaactaaacaacttgctcggggtttagcagatattttttcaagtcaattagaactgggactggccgaaacgcaaagtaaattattacgagatgctgaaattaagtctctacaagctcaagttaatccacactttttctttaatgcgattaacaccatttcagcacttgtacgtattgacagtgaaaaagcacgcaagttacttttgcaattgagtcaatttttcagatcaaacttacaaggtgcgcgtaatagcacgattactttagaaaaagaattacaacaagtcaaagcatatttatcattagaacaagcacgttttccagatcgatttacaattaaatatcatattgatgatgcctataaacaagtattaattccaccattcatcattcaaattttggtggaaaatgcaattaaacacgcattcaaacatcgacgaaaagataacattgtttgtgtagacgttcaatacaaagaagcctcattaaaactatcagttagtgataatggacatggtatagcgcctgaaaaattaccctcacttggacaaatcagtgtggcttcagaaactggaactggcagtgcattagaaaacttaaatcgccgcctcactggtttatatggttctagtgcaacgttacactttgatacatctaatcatggaacaacagtatcctgtatgattccataccatttaataaaggaggaacgttaaatgaggacacttattgttgacgatgagccattagcacgtaatgaattacattacttattaaatgaaatatctagtttcgaaataatcgatgaagctgaaaatattgaagacactttagaaaaactactctgtcatacctatgatttagtatttttagatattaatttaatggatgaaaatgggattgatttagctcataaaattcgaaaaatgaaacaccccccttatatcatttttgctacggcacatgatacgtttgcagtaaaggcatttgaattagatgcagtggattatatattaaaaccttttgaatcagaacggattgaacaagcagttcaaaaagtaaaacgattattaaacgctaaacaacaggttcaaacattgtctgaccctattcactctccacaatcacaaacgagtacttcttcttatactaatcatcaaagtgtacttcctatcgaagtggatgaacgtatttatgtcattaatttagacgatattgttgcgatttctgtgaacaacggaatttcgactattacgactttaaaaaaaacatatgaaacgacagaacccctcaattattatgagaagaaattacctaagcaattgtttataaaaattcatagagctacgattattaataagcagtatatcgaaagtgtcgaacactggtttaattatacgtatcaagtgacaatgacaacgaatgtcaaatttcaagttagtcgttcatttatgaaatcattcaaacaagaaattggtcttgtttaatatctattctaagttagcttttaacctaacgcttcatatgatcgagtgttagattaaaagcttttttaatgacctcatagcttatttgttgttctataaacactttctgattttcaactgggaaatactgcaactcacctattaattttcgtaactcacttctaaatctaactcaagaaagcggtttcattttatactaacatcaagagaaaagaaaaagagggagagtatcaatatggcgaaaaacaattcaactaccgctaatactcaaggaaataagaaagcaggtaaaacttacaatttctttatccaagtattaactattgttgctgtattatttgtttcaaaaattattgaatcatttattccgtttccaatgcctgcatcggtaatcggactcgtattattatttattttattaagttcaggagtcgtaaaattacgtcaagtagagggtgtgggaaccgctctaacaaataatatcggcttcttattcgtaccagccggtgtgtcagttattaattcattaccacttttaagtcaacatccaattttaattattctattaattattatttcaacattattattattagtcagtgtgggctatgtatcacaattatttgtaacaaaaacattattccctactgaagaacaaaatgaaaaaacacgacttaaggaggaaaactaatggctgatcacttaggtattacaacaccttattttggtattttagtctcattaattccatatattattgcacaatatttctataaaaaaacaaatggctttttcctactggcacctttatttgtagcgatggtggcaggaattgtctttttaaaagtaacaggtattagttatgataactataaaattggtggagatattatcaacttcttcttagaagctgcaacaattagtttcgcgattccactttataaaaaacgtcaagtacttagaaagtattggttacaaatttttggtggtattgctgtgggtacactagtagctttaatcttaatctatttagttgcaacattattccacttaggtgatcaaattagtgcgtctatgttacctcaagctgcaacaactgcgattgccttaccagtatctgacggtatcggtggtgtaaaagaattaacatcattagcagttatccttaacgctgtcgttatttcagcattaggtggaaaaattgtaaaaatgtttaaaatttcaaatccaattgcacgtggtttagctcttggtacaagtggacacacacttggtgttgccgctgctaaagaactaggagaaacagaagaatcaatgggaagtattgcagtagtaattgtaggtgtgattattgttgtaatcgtaccaccacttgcttcactattattctaataaaaaaagcgttgctgacgaactaagtaacaacttagtcatcgtctaagcaacgcttttaatttatcttaaactttgtacttgtttactagaacgatgtgtgggatctaattttttctctaataaacgtagaccaatatcaattaaaatcgcaattaatgcaattggaatcgcacctgcaagaataaagactgtaccatcagtagaattggttccacgaataataatgtctcctaacgtcggtgcgccaataaatgaaccaatagcaacaattcctattgctacaacaagtgcaatacgaataccaccgatgatcacagataacgatagtggaagctcaatcatacgcataacttggttattagtcattcccatacctttacctgcgtctttaatattgtagtcaacctctgtcatacctgtgtaggtgtttttaataatcggtagcaaggaatataaaaacactgcaaatacaactgttgatggaccgagccctaacgccaacatcagtatagcaagcattgcaatggctggcacggtttgaataacattagcaatagtaatcactggccatgctatttttgaataacgtgcaattaaaataccaattggaatgccaataatacatgcaaacaatactccatatatagacattaataaatgtttaaaaaagagttccatcagatagccaaaattcaaagtgtaatattcataaagcgaacttaacacattccctttcactgttattgaccacctttcttatcttcaaaatagttatgttttttaataaattcttctgcaatgacggctggttcttttccttttccatctgcttcataattcagtttttgcatttcttttgtacttattgtattttctaattttgttaaagctttatcaatctctggatggtctttaattaattcttctgtggctaatggactgccatcatatggagggaaaaagttacggtcatcttttaagattttcaaattatatgccgcaatacgtccgtctgtggagtaaccaacggcaatatctaattttttgtttttaagtgcatcatacactaaaccaatttgcattggacgtgcacttttgaacttaaagccatactctttttggaaagctgggtatccatctccagcacgattcatccattgagtatccatacccaagcgtaactgatctttatatttttctaagtctgatactttttctaagtgatatttatcagcagtttcttttgttaccataaacgcatacgtgttttcaaagccaagtgaatgataatatttttgatcatatttctttttaaataatcgctgtgactcatccatggctttattcgcatctctagttgggggtgcatcgagtacactggttaactctgttcctgtaaaacgcaccgctgacatattagcatctccacgcataagtgcattatgttgaacaatacttgaacctaaatttccaataatgattggtttgatatctccatttgtataatgttcaatcattaatttctcaatatttgctactattttggtttcactactttcagtcgctgtaattttcacactgtctttcgaattactgtcacctaaaccgggtaagccgcatccagataatactacgagagacaatgcaagaacgataaatatatatttaatatctttcatagctgttcattcctcccttttaaactatctagatactttaagacctttaggtacagcccatttttcaactaaagataataagaaatccacaatcagtgccaagcaagtcactaaaattgtagcactaataatcattggtggttcatagagagttaagccattaaatactaaatcacctaaaccacctgcaccaatataactcgcaagtgtagcccagctaatgacatatacacttgcaagacgtataccactaataattaatggtaaggcaaggggtaattccacatctttcattaattgaagttttgtcatccccatacttgttccagcttcaataatgtttttatcaatattttgaactcctaatactgtattatttaagataggtaataatacatagataaataaagctacaattgctggtgtcttacctacaccaaaaattggaatcataagcgctaaaatggcaagtgttggtaccgtttgaagtacacctgcaatagtcaatacaacattcgccgtacgttttgtttttgataataaaataccaagtggtacagctacgacaatagcaataagtaacgaaataatagaaatatagaaatgttctatcgttttcgatacgagttcttctccgtattgtgcaaaaaagtctctcattaacgatccactcccgtatcatccgtattatgggtatgttctctatctgttccgttcataatatcttcatgataacgttgtgtaccttgtgttgttaaacgttgttgtgtttcattttgacgttcattctctcgctcaacttcatttgaataggttttagaagagtgactcgtttcattctcttcaccccaaatggagtcatacacaatatctactaagtttgctcgtgtaatcagtccaattaatgtatcatgatcatctactacaggcacattacgtacattacgctttaaaatagttcgcactgaatcttgtagttttgaatcgatatgtactttataaacatcacgctgcatcgtatcaattaattctttaccttgacgtaatccttgatttatatcttcaatatctaaaaaccctaaaagacgatgtttattattcactacaaaaatagtgtctatacgatgggttctcataatattgactgcatcattaagagaatcgtcagcttgaatagtaattggtttgatcattgcatcttcaaccgttctcatgtttggtcgatcttgaatcagtctattttgtccaataaattctctaacaaaatcatttgctggatatcttaaaacattgtccggtgtatcatattgaacgatctggcctttcgacataatacaaattttgtctgctagcttaatcgcttcatccatatcatgagttacaaaaataaacgtttttcctaactttttttgtaaatctttaactaaatcttgtaacgtatctctagttataggatctaatgcaccgaacggttcgtccatcaaaataatgtcttgttctgctgcaagcgctctaactacaccaatacgttgttgttgtccacccgacagttcagacggataacgatctaagtaatcctcaggtaaatcgactaatttaatcaactcttttgctttagcatctttcttttctttagaccattttaaaagttttggaacgagcacaatattttctctgatagtcatatgtggcattaatccaatttgttgaatcacgtatccaatactacgacgtaattctactggattcatgttacgtacatctttaccattcatttcaattgaaccctctgtaggttcaatcatgcgattaatcattcttaatgctgttgttttaccactaccacttgttccaataaatgcaacaaattctccagcttcaatatttaaagaaatattatcgactgctttcttatttccagaataaattttagtaaggttctttatactaagcgtcataggatgtccccttctatcgtattaatgatggaaaattttaaatacaaaaaagccaaagtattctatttttgattgtctcaatcaagaaccatatggccattgcgtaataaagttttaaaaaattgcattttaatagaaatcgttaaaattccaccacctatacttatataccctttataattttttgaaacattatttatatgtaataattaatttttttacctaattatttttttaagtttttaaatttaacattacttatatacaactattctttgtaaatagtacattccaacttttttatattgtctacaattaaagttcgaaaaattgtcaaatttttctaaagtgtttaacaattcatttatatatatttgaatttctgagttcctcgtattaatctataattacaaagtgttttttattatgaaagggatgttatatatcatgaaagcagcagtatggtatggtcaaaaagatgttcgcgttgaagatcgtgaaccaaaagaattaaaagataacgaagtaaaagttaaagtatcttgggctggtatttgtggtactgacttacacgaatatttagaaggtccagtatttatttccactgacaaacctgatccattcttaggtcaaaaagcacctgtaactttaggacatgaattctcaggtatcgttgaagaagtggggaaagacgttacaaaatataaaaaaggtgaccgtgtcgttgtaaacccaactgtttctgcacgtgaaaaagaagaaaatttagatttatatgatgggtatacattcatcggattgggttcagatggtggtttcgctgaatttactaatgcacctgaagacaatgtgtatcacttacctgaaaatgtgtctgctcaagaaggtgcattagttgaaccaacagcagtagcagtgcaagctgttaaagaaggtaacttattatttggtgatacagtggctatctttggtgcaggtccaattggtttattaacagtcgttgcagctaaagcagctggtgctagtaaaatctttgtatttgatttatcagaagaacgtttagctaaagctaaagaagtgggcgcaactcacgttgtaaactctggtaatactgacccattagaattcgtaaacgaacatactgaaaacggtgtagatgtaacctttgaagtagctggtgttggcgtaacattagcacaatctgtaaaagtaacacgcccaagaggtagtgttgtcattgtttcaatctttgcacacgaagttaactttgatccaatgttattgacaaactctggtgttaaattaacgtctactattgcttatacaccaacaacattccaacaaacaattgatttaatcgcaaatggcagcttagatgttaagagcgttgtcacagataaaattgaattagctgacatcgttgaatcaggattcaatcaattagttaatgataaatcacaagctaaaatcctagttaaattaaatggtgaccaaaaatattaattaaatgttttaaccctgtaaagaaaacttctttacagggttttttgtattatttcaaatcatacgattctatgcctatcatctctatttttatttatcatttattccctttctacatcggtttcactacatactttttcataacattatcatcattatattatagaaaaaatttaataaactccttttaataatattttgaaatctcttaaatatttagtttgactaattaaatgataagcgtataattatatcgtgttttttttataaaaaataaaataaattaaaaggagtatttatgggaaagaataaaaacgataataaaattagcttgacgcaactcgtgttactcggtttaggttcgttaattggttctggttggctctttggcgcatgggaagcatcttcagtagctggaccagcagccattatctcatgggtcataggcttcatagttattggaacgatttcttataactatattgaaataggaacaatgtttccacaatctggtggcatgagtaactatgctcaatatacacatggttcattacttggcttcattgctgcatgggcaaattgggtctcactcgtaacgattattccaattgaagcagtatctgcagtccaatatatcagctcttggccttgggactgggctaagccaactcaggcattgatgcataatggttcaataagtacagttggtttatttgttgtttacataatcattattgtcttttcattattaaattattggtctgtaaaattattaacgtcatttacaagtttaatttctgtatttaaattaggggtgccactcttaacaattattatgttaacaatctcagggtttgattcaggaaactatggtcattccttgaatacatttatgccatatggtagtgctcctatctttgcagcaacaacaacatcaggtattatcttctcatttaatgcattccaaacgatcattaatatgggctcagaaattaaaaatcctgagaaaaacattgcacgtggtatcggcatttcactaatattaagtgcaattttatatattatcttacaaagtacatttatcacttcaatgccacaatcaatgattcattcacatggttggcacggtattaactttaattcaccatttgcagacatggcaattttattaagtattaattggttagccattttactttatattgaagccgtagtatctccatttggtactggtgtatcatttgtagccattactggtcgcgtattaagcgctatggaaaaaaatggtcatattcctaaattcttaggaaaaattaattcaaaatataatattccacgtgttgcgattgcatttaatgctgtcatgagtatgatcatggtaacgttattccgcgattggggggtacttgcagctgttatttcaactgcaacattagtagcctatcttacaggccctactacagttattgcgttacgtaaaatggggcctaaattgcatcgtcccttccgtggtaaattattaaaaatcatggcacctttatcattcgtattagcatcattggccatttattgggcaatgtggcctactacagcagaagttattttaattattattttaggtttaccaatttacttcttctatgaatataaaatgaattggaaaaatactaaaaagcaaattggcggtagcttatggattattgtctatcttattttattagctgctatgtcatttataggtagtaaagaatttaaaggtatgaactggattcactacccatatgactttattgctattattgtgttgtccctcattttttataaaattggttcttcaagtcacttcaatagtatttacttcaaacgtgctaagaaaatcaataaaaaaatgaaagatggttcgccagaagaagcggaagcagctgctaaaggtaacgaataatcattcaaacgtctgaaacaagttagagaatagtctcatcttgcttcagacgttttttttaatgttatattagatataagataagtatggagatgatactgttgaccttaattaaaacacatggcggagatattaaaggctatactaaaaagaaaattaattactttctcgggattccttatgctaatcaacctatcaatgaacatcgatttaaacactcgaaatgcttaaaaacttggaataagaccattgaagcaacatcgtttaaatctataccaccacaaccctacaacaaactcgaaaccttcttctcatcacatgctcaattatttaatcaaagtgaagactgtttatatttaaatatttggtgtcaaaataatcaatataaaaataagcctgtcattatctatttttatggtggtggctttgtgaacggacatggttctcaggaactttatacacctgaacatattgttgaacaacatgatgtcattgtcattacgtttaattatcgtttaggtgctttaggatttttagactggtcttacttcaatagcgattataataaaaacaatggtttgtctgatcaaattaatgcactcaaatggatacatacgtttattaaatatttcggtggaaattcaaacaatataacattaatgggacagtctgctggtagtatgagtattatggcattaatgcaacgaccagaattagataaatactatcatcaagtgatgttattaagtggaacgctacgtcttgattctcatttattaggacaaaagaaagcagcccattttgcctatctgaaagatacctattttcctaaaaaaagaatgactcatttaacaactttagagatattatcattaatggcttatgatgaagcatcacgcggaaaatcaaaaggtcttgaattgatttatgcacctattcaagagtcaaacatgtctcgtcccctttctcaatttactaaaccggttgttataggtactacgaaagaggaaggcaatatttatattcgcaatgaatctagaaaattatcacctgagcgctttgtggaagtcatgacattaaatgatatacaccttcacatttctcaagctcaaactggtaaagaccaagcccgtatggtgacaacgcattattttgaaacacctgcaatttcatttttaaatcaacttgacaacaatccccattgttggaaattacgttttgactggtgcctttctaatgcatcaccgtttcaatctgcttatcatattttagatttagtgttttggtttggaaaattagaggttttaaaagcgcatggtgtgaactcattagaacatgaacgtcatctcagtaaacatatgatagatgatttaatctattttgcgacataccacactatgccgtggccatcttattctcctcaaacaccttattgttatatatataaataaaaagaagcggaacaatgaattcaaaatgaattctgttccacttcctacttaattttttatataagacatattttttaaacttatgacaataataagacccatagctccaaccattgcgctcacaatcgtgactgcttgaacagagatatttgaaacaacgagtcctccaataatgcccccaaatcctattcccgcattcagactcgacatattccaactcatcacttgactcgtatcaccttcaacatgttcaattataccactttgaattgctgggttggtactccactgtacaatattccatataaacaatccaattaataatagggtaacagtatgcaaaataagattcattatcaacatcataactataaaaatagaaaaggcaatgattagccaacgtttactgctaagtttatctgctaatatgccacctaacgacgtaccaatcactcctgcaatcccattcactaataacgccaatgatacaaatcccatttgatgaccatgattcaaaataagaggattaatataaacaaatgtcacagaatttgctactaaaattaaaaaagtaattgctaaatatttgactacctccactggtcttaaaattttagatgtatttggctgtttatttgaagttgaaccccattgacgttgaacttgatttaattctgatgttgatggtaaatataccatcatcagtacaccagctatcacactcacaataataataaataagaacgtaaatctccaacctattgcatccccaatcatcgtaccgattgggacgccaaatacattagccccactaaatccagtataaacgacaccaatcattttccctctatttttaggtatcgttaacatcgctgttaaagctaagactttaacgataatgagtgaagcggctgctgaagataagatacgtccaatcactaaaatagtaaagttaggcgccatcgcaatcattgcatttccaatgataaatgcaacgagtgtccataataagaccggtcgtactgcaaagcgattcgtaagcttaacaagtatggggccacaaatagcaaatgttaatgcatataaagtcacaagctgaccaataatcgcttcagagacaccgagatctccactcattaaattcataattcctgcaaccatcatctcaaccataccgacgataaacacactaataatgaaggttgccactcgcatgacagacatgcatagaactcctttctttatatattttggtataaaaaaacagttacgcaatggtaacctttatcattcgtaactgtttcattatataataattttttaaatttttgtgcgaaaaaatatgtcattgagatttagttattgtcttttatattcgttgtacgtgctacgagttgatgacgtgcattaaagaattgaccataacttaaatacgttgcaatcaatgcagacataatcgttgcagtagtatgaataaacacaacaagtaattggaatttgatggcttgtaatggtgccatacctccaataattaatcctgtcatcatacccggaatagacactaacccatatgtttttacagaatcaattgttggaacaatcgctaaacgaatactttcacgaatcgcccctttagacgcaagctttggcgttgctgctaatgttaacttagattcaatatcatctacatctcgaacgaacgcacgatctaaattttgatatgccaaattaatggcaattaaaccattatttgcaagcataccaccgataggaatgacatcatttgctttaaaatcgatagcaccagcaagcactgcacatactaacggaattgctgttgatataaatatagaaacaaaagaaatccaaaacacatgatgcataacaggcgatgcacgatgaattgtattccaagaagcgttaataataatgactaatactgcaatcaataatatccatacttgatcaattttaaaaatatattctaatatcaatcctaaaattaataattgaaccaccgctctaatcgaagcgacgactaaatctttgataatatgtaagccttctttatatgaaataataataggaattaataataataatgctgttaaacaaagcgctgtattactcattatgacttaacacctcctcatttgtaatctgaccatctttaatagtaattcttctttggaaatttctcatactttgatcattactatgcgtaatccataatatagcgacgccttcatctgctaatttaaagataatatcttcaattttttctttattttgcgtatcaagtgcactcgttgattcatctagaagtaatatttctggttgatacattaactggcgtgcaatagcaatacgttgacgttctccaccagacatatgttttacttttgaatctagactatagtttgacaagccgactttattaagtaaatcattcgctttatcttcatcaaattgatcatgatgcgttaatgctgggaaagccatattatcttctactgtcgttccaaataattcactttgttgcatcatgtaactaattttagaacgtaattcttcaggactgtactcatcatatggttttcctttaaataacaattctccttcagtcggactaattaaattgttgagttgctttaagaatgtactttttccgcttccagaaggaccaaccactgcaacggtttcaccttgatctaatttaaaattaatattattgagtatcgttcgttgatctgctttgtaggtcagatgttttacttctaataacacaagcgtttcctccttatctttactctttaatgagatgacatattcttttttatcataacaaaaaaagaggcaaagtaatgaaattcaatgttactattttttgaatttcaatgactctacctcttactcttaaccccaaatgatactcataataatcgctataaaagaaataaaattatttatcatatgaagggtaatcgtcatcgctaaatttcgaccacttaagtgatatgccacaacaaatcctgtagccataattaaataaggaccaacttcaaatggtgatgatgcacttgtcatatgtaatcctgcaaatccgagcactgacacgacatacatcacaccatacgttaattttttacctaactcatgaattaacaaatgtctaaataataattcttctacaaaaggtgtaataatcacaatatctaaaaataaaacaggccaaagccaattgatttcaaacattttaataatcattttgttattttctgtatcatcaaactgatattgtttcggtaaaaattccattaaataaccatatgcgccttgcaacacataaagggccaccatcacaatgataatgagtggaatatgtttttttaaagctttgaatcgtgagatggcaataggaataatggttttgcgatgcattaaataaaagactactaatacaagacattgaccaattaacgtaaagacttgggcatatcctaaataatattttgtaaacttactttccgatatatgacctcctgtgatgcctgaaattattcccatcacaataaatgtaagaatcaacggaaaaacaatattcatgactaaatatgtaggtatgagccaaaaatcacgtttaacaatacgttttgaatcaaattcatttcttatcggtcgctgctctgaggtttggtagtatgtatcattatgttccgaagtcatataactctcctattctttctatttaaacaagcttatcaatcattgtaataataaatatgatgagttgtacagtactatgataaagataggacgctgctaaatttttcccacttttcatatatacaatcactgcacctattgaaataatcatgtaaggtatggcttccaatattgaaattaaatcatatacttggacaatggtttctattaaaacactaacaatcatcattactaaaagattaaattttttgcctaattcatgaatcaatagatgacgaaatagtaactcatcaattaagggtcgtaataatactactgaaataaaagtgaatatcagtgcacttggatgaataaacaatccttctaaacgacgttgtgcttgtgtgtctacgtagccaaaaggatgcggtaacatgtgtgccaatgcattaaaaccataatataacatcacactaacgattacggtgattataatcaatttcaaatactgatgaatcgcaatacgatattgtcgtcgtacaacactcgtaatataaaacttatgtaatgtgaaaaataatcctaacacaataaattgagcaatcacaaaacttaaacttagcatcacattatataaataagatggcggtggttgttgggtaaccatagccgtcacacctaatacaccaaaaacaataataataggcgttaaaatttggaaaaagataaacaaaggaatgagtagaaaatctttttttattatttcaggattaccccatcgattttttgataccacttgtgtgatcacatctttttcttttttcatatatcacctcaacgatctacgtatatagtactttatcatttaaaaacattattgtcataagagattctaactttttcattatttgatatttaaagataaatattaaatctatttatttttatttgtaaatacaattttttgatgtaagatttacagtataaaggggattaagggggggatgggcatgacaacattacttactgtcatgcaatttatagttaatattcttattattatggtgttactgtctctattaattgttgggttatatcttttattcaaagataaaagacaagaacaacatagtgtgttacgtaactttcctgtattaggcagagtacgttacttttcagagaaaataggaccagaattacgtcaatatttatttgcaaatgataccgaaggaaaaccattttcaagaaatcaatatactgatatcgttttagcaggtaaatatcattcaagaatgactagttttggtacagaaaaaaactatgaagaaggcttttatattcgaaacgctatgtttccattacaaaagtcagaacttcaaattgataaccattcaatgatttcaacatttatttattcaatcgataatgaacgattgtttaagcgtgaagaacatcgtgagaataaacacatcgatccttattatttatcagatgatcatgcagttattataggcgaagaattagcacatccctttaaagtcaaacgtttagtaggccaatctggtatgagttatggctcattaggtgggcgcgcgattactgcattatctcaaggacttgcacgtgctggcacatggatgaatacaggggaaggtggattatctgaatatcatcttaaaggtggctgcgatattatttatcaaattggaccaggtttattcggcgtgagagataaagacggtggttttagtgaagaagctttcttaaatgtggcaaaccataaagaagttaaagcatttgaaattaagcttgcacaaggtgctaagacacgtggtggtcatatggagggcaataaagttacagaagaaattgctaaaattcgtaatatcgaaccctataagacaatcaactcacctaaccgcttcgatttcattaataatccaaaagagttattagaatttgtagctaagttgcaaaaactcggtcagaaacctgtgggatttaaaattgtggtaagcagagttgatgaaattgaggcccttgttcaagaaatgattaacctagatatttatccaaactttattactgttgatggtggtgaaggtggaacaggggcaacattccaagaattacaagatggtgttggcctcccactttttactgcccttccaatcgttactggtgttttagaacgttatgatgcacgcaaatatatgaagatattcgcatctggaaaacttattacaccagataaaatagccattgcacttggacttggtgctgatttatgtaatattgcaagaggtatgatgatcagtattggttgcattatgagccaacaatgtcatttaaatacttgcccagttggcgtcgcaacaactgatgctaaaaaagaaaaagctttaattgttgaagaaaagcaatatcgtgtcacaaactatgtgacgagtttacatgagggattatttaatgttgcagctgcagtaggtgttaaaagtccaaatgaaattacagaagatcatattgtgattaaaagaaaaaatggatatattgaagatatcgcaagttataaattaaaacttattcaatagtcaacaaaaaagtgagacaatctatatcatcgaaaggttgtctcacttttttattattcttcattcatattgctttttttcttgaatccaatttttttaagttctttgaccgtaccatccattgtcacttttttatagtttttagaataatgtgctaatgcaaagtaacgactaacatcttttaagtttgctttgttataatcaatatctatgttttcaactattttttgatgcctactacttagcgtatatgttacgcccttttccccttttaatggacgatagtctttaaaagatttttcaccttcttgtttagacattcccagatcatcatattttaaagtactgacagttgattgtttaatcactttattttttttataagttaatgttgtaagaacatgcttaccatcaatatcaccttcgtatgtttttgaacgtgattgactacaagcccctaatatacaaacacttaacactgacaacacaaataatgttaagacttttttcattatgctcatctacttccccatctttaattttaaacaaattatatcacttaccaactatgaatgggatacatttaatttgcatagatatgataaactattgttcataaaattcattttatccatgctacaatacacttaacgaattttttaggaggactcaatgtatgaaagaatctatcgaattactaaaaacattaacagatgttaatggtatcgctggttatgagtaccaagttaaagaaaaaatgcgagactatttaacacctattagtgatgagattatcgaagatggtttgggtggtatcttcggtaaaaaggaaagtaaaacgggatctaaatcattaatgttagctggtcatttagatgaaattggattcatcgtcactaaaattgataataatggatttattaaattccaacctattggcggttggtggagccaagtgatgttatctcaaaaagtaaccatcacgactgacgatggtaaagaaatacgaggtattattggttctaaacctccacatgtacttgaaccagaagcacgtaaaaagtctatcgatatcaaagatatgtttattgatattggtgttagaagtaaagcagatgctgaacaatacggtattgaaattggaaatatgattacaccttatagtgagtttgaacaacttgcaaatggtaaatatttaactgccaaagcatttgataatcgatacggttgtgcacttgctattgacgtacttaacaatcttaaagatgaatcgatcggtattaatttatatgcaggtggcactgtacaagaagaagttggtttacgtggcgctaaagtcgcagcaaataaaatcaaccccgatttagctatcgcagtcgacgttgcggtcgcatatgatacacctggaatggcacaatatggtagtgatacagccattggtgacggcccagtaattattttaatggatgcttcaaatgtggcacatcaaggcttacgtcaacatattaaagaagtggcaaaaaaacattatattacggttcaatgggataccacaccacgcggtggtacagatgctggtagtatccatgttgctaacgatggtattccaacaattgctattggtgtggcattacgctatatgcactcaaatgtatctgttctccatacagatgattatgaaaattcagtacgattaatcactgaaattgtacgttctttaaatgaccaaacgtataatcaaatcaaatggtaatttgaatattgaaatgttacatctacttatgttaatatcacattaacgagtattaacgtcataacgatgcgaacccctagtctattgccctagactaggggttctttgtgtattggattatctgccgtcttttttattcttatattgttcaaaccaataatcaaacaatatattgagccacctatttaatataggtgcaataacgagtacaaatattaacgtcataacttcacctcctttaaacgtactaccgtctaaaggaaagacgacgacaatattataccatttttataaaatagaataatttatctaaatatataaaaagtgagagacagcctcatactgaaaccatctctcacacttaaacgctaatatatccactatgatttattctacagaatgtttccatttatcttcacttaacatttcaccaggccaagtgtatgccatcacaccaccatcaatacgaatcgtttcacctgtaataaatgaactatcatctgatgctaggaaagcaaccaatttacctacttcttcaggttgtcctaaacgaccaagtggagtgacccatttctgattatcgcggaatgttttacccgcttcatcttcagatgtaccagctaaattatctacaagcggtgtttcaatggtacctggtgcaatcgcgttcgcacgaatattttcacgtccatattcaatcgcaatcgatttagtgaaattaatgacgccacctttagcggcattataaccagaacgatacaagtctgctgcttgtcctgagaatgaagctgtattaatgattgaacctccattatccaacattaatggtaataagaatttcgttactaagaatgtacctctcatatcgacagacataattttatcaaatacttcaactggatattcatgaatacgtcctgccccattatctacacctgcattgttgaagataatgtcaatgtgaccatagtcttgtttaactttctcagcaaaatctttcacttgttgatcttgagagatatcaactttataagctgtcgctttaccgccctcttgattaatgtcatctacagttttttctaattcatctgaaatatcaagtgctaagacatgtgctccttcttgcgctaacacttttgccgatgcttgtccaatacctgtactcgcacctgtgatgactgcaattttattttctaaacgtctcatcttatcacactcctagtgaacttgttttctaatacaaccttattcttccactaaacagtttagattaaacgtgatactaaaaatgaaatcgttttacaattgaattcttttctatatccaaagaaatgtaaatatgattcgtatctttttctattaataaaattcatgtaaaataaaactataataggaagtattgaaagacttaggaggccatgatggaagaacgtataggattaatagatattggctcgaatacgattagattagttatctttagatttagcaaagatgcaggattaaatgaattgctcaacattaaaacgcctgctcgcttgagtcaatatttgacaaaagaaaataaaatgagtcaagaaggtattaaagtactcattgaagcattacgcagttttaaatctgtatctgaaaaatttgaagtaaaagaattgcatcctatcgcaacagcagcaattcgtcaatctgagaataaggatgacattgttaaaaaagtaaaagatgaacttgatattgaaatttcaattatccctgaaaaagacgaagcatattatggttattatgctattactcatactacggaaattgaaaatggcgtatctgtagacatcggtggcggttcaactgaagttactttatttaaggataaagaattatttgaatcacacagttttcctttcggtgtagtaacattaaaacataaattctttgatggcaaagatcacaatgataaaggcgcgatcaaagatatggagaaatttctatctcaacaatttagtacattagattggcttaaagatcaagatgttgcattagtcggcgtcggtggttctgcacgtaacgtagcacgtattcatcaatccgaacacgcttatcctataagtggtgtacacaattatacaatgtcagataaagatattgatgaagtgtacaacgttatacgtaaaagttcacgtgatgagttaaataacctagatggattaagtcgcgatcgtgcagatattattcttccagcggtgtcagtatttaagacactttataaaaaaatagatgcgaagcaattcacattttcaagaaatggcttacgtgaaggttatattattaaacaaattcgctcacgctatccagatgtatttgacaaaaataatgtgcgtaaagaatcgatttatttcttagcccatgattatcacatcgaagaacatagctcacaaggtcgtctaaaattagcacaatctttattaaaacaattacttgatttaggtgatttaaagattaatgacacagagcaacgtctctttgaagaagcgacctatatttattatttaggtagatttattgattcagattcaagttctccacatacgtattatattatcgcgaactcaatgattaatggttatacacataaagatcgcgttaaactcgcccttttagcaagttttaaaaataaatctttacttaagttctattgtaaagaaacagattggttcagtaataaggaaattgaaaccattcaagcactaggtggcattattaaatttgtgaatgctttaaatatttcacaaactagctttgttgaagacgtgactttaaaagaaacgaaaaaaggcaatgacgattatgaactgaccgtacattatactgaaggtgaaccgattgctgagaaatatcaagcattaagacagaaaaagcatatcgaaaagattcttaaaggatcagtatccattgtctttacaaaatcttaaaatttgtatgctatattataggcagatagttctgtcatagactatatatttttacaaatagaaagattgataatcgaagaaatgacgaggtgtattttgaatatgcaaactcaattgggagactatgatattagcttgccgaagtactataataatcgcgaactcagttggttagatttcaactatcgtgtattacaagaagcttatgataacaacaatccactattagaaaaattaaatttcgtatctatctttagttcgaacttagatgaattctttatggtgcgtgtggctggtttaaaagaccaagtaaaaatgggattcgataaacctgaaaacaaaacacaaatgacaccacaagaacaagtagatgcgattcaagaaaaagctaaaaaatatgtcaatatgcaatatgaacgctataacgaacttatcgaagaattacgcaattatgacattgttatgtgtaaaccagaaaacttatctgactctattttaagcaagttagaaagagattttaaactaactattttaccaacgttaacaccacttggtatagatgcataccatcctttcccaaaactaaataataaaagtctaaatatcttcgtagatatcgatactgatgatgccattaactcagcgattgttcaaattccatctcttatccctagatttttaacttataatgaaggttcaaaacaatatgtagtcatggtagaagatgtcattacacacttcattaatcacttatttacaggctatgaagtattaaatacctttacatttagaattactagaaatgctgatttaacgattcatgaagatggtgctgaagacttacttatcgaaattgaacgcttcttaaaagaacgtaaaagtggttctgctgtacgcttagaagtcgacaatcgtacagcgtctatcgaagatttaggatggttaacagacactttagaagtggatgaacaagacgtttacttacttaatggacctttagatttaacatttatctttggcttagttgaccatctatcccataaattgaaatatttaacatatgataaatatacaccacaaattccacgttcattaggtaacaataatgtgtatgatcttgcattaaaacgtgatgtctttttccatcacccatacgaatcatttgagcctatcgtagactttattcgtgaagcagctgaagatcctaacacgattgcgattaaacaaacgctttatcgtgtaagtaaagattcacccattattaaaagcttaaaagaagcggctgaaaatggtaaacaagtgactgtacttgtagaattaaaagcacgtttcgacgaagaaaataacgttcattgggcacgtatgttagaagatgcaggttgtcacgtcatttatggtatgacccatttaaaaacacatagtaaaattgctcttgtcgttaaacgtatcggtggcgaattaacttcattcgtacacttaggtacaggtaactataacgataaaactgcaaaactatacacagatatgggtgtgattacgacagataaattaattgctgaagatgccattaatttctttaactatttaagtggttactcagttaaacctgaatataataaactaattgtcgcaccattcgatattcgtgacgtctttattgatcgcattgataaagaaattgcaagtcatcgtcaacatggtaacggtaaaattatgatgaaaatgaattccttaactgataaggccatcattgaaaaattatttgaagcatctcaagcaggtgttaaaattcaactcattattcgcggtatttgttgtctaaaaccaggcattccaggtgtcagcgaaaatattgaagttgtcagtattgtaggtcgtctattagaacactctcgtatttactacttctacaataatggtgacgaacgtatttatttatcatctgcagacgtaatgacacgtaacatgattaaacgtgttgaaatcttattccctgtagaagataaagaaatcggtaaacgtcttgtagactttatgaatttacaattatctgataatcaaaaaggacgttatcaagatcagtatggtgattatcattatgttcaaaatgatttatctccattaaattcacaagcttacttgatgaaagaagcagttaaatatggtaaaaagctaaaaaaggagacaacccagccttcaggaatgcccgtcgtttccaaaagaagagctagctgggtcaatcgtcttcgaaaaacattaaaaaaataatataaatataaaatagccaagtcgtgtcattcataagcacgacttggctttttattttatttctcaggatgttcataccagtgttttaagaatgtatataacacatcactataagtttgaagttcttgtgcttctatcttttcatctacactatgagcttcttctaaactacctggaccatataaaatggttggaatatcaaaatgagccgtccaacctccatctgtcactgtagtactcataccatgtttcatttcgctatgatgaacgtgataatgcgcatcttgtaattgtttaaagcctggatgttctaatggaatagtaaaacttgggaaaatttctcccttatcttctatcattgattcaccgccccattcaaactgtaacgggttctctctcaaccaaatgtctgcatctgcaacacgatttaaatacgcttctatctcttttgtaacgtcgtcataactttcattcggtaaataatgaaccgtaatccataaacgacattcatcagcaataaaagcaggatgacgtcccccttcaataactgctggattaattgtattcgcacctggtggcatcccaggactatgtttcattactgcccagtgttgttcaagttcattcagtgcttgaatgattttagtcattttttcaattgcactcgcaccaaataaacctccgccagcatgaatcgtttgactacgtgcgccatcatgaatggtattcttacttttaaccgtaatccaccctgtaatgaccccgccttgtccaagtgccatattttcacttgtatctaatactaatgctaaatctgcttgaggaccgatttcacatgcgcgttttgttcccgcttcacccacttcttctcctactacagattgcacgacaatatctcctttaggtcgtcgtccttcttgatgtagtttttcaagcacataaaacagcgaggccataccgcctttcatatcactcacaccacgaccatatagccatccctctttttcagtcagttgaaacggtggatattgccaattagaatcatcgtccacattcgccacatctacatgaccattgagaattaatttaggtgcatcctcatcttccccttttaatgttgcgacgataacactatcattttcatataaatgttcacgttgaatatcaaaatttagtgtttttaataaatgttcaatgtcatcttgtaaaggatccgtattacgtccaggaggactctccgtattatatttaactaatacatctaacaattcaaataaacgttgttccatcactttatcacccttttaagttatatgatctttcaatataagtgtaacatttcaacactaatattgaagggtaaaaaggagcgtttcctaccataggcaagaaacgctcttattctcattagatttaaactggacgaacgacgacttcattaacgtttacatgtgcaggttgcgtcactgcatagattaccgcatcagctatattctcaggatctaatttctttctatcaccaaagtcatatccttctgtcataggtgtatctaccattcctggtaaaatactggttgatttaatacccgttcgcgcaagctctttttctaaagcttctacgatacgtaatacagcagatttcgttgcactgtataatgcacttgtcttattaacttcaaagcctgaaatagatgccatattgacaatatgaccactagattgtgcttcaaaatgaggaagtacggcattcagaccatataacaatcctttaatattcgtatcaaccattttatcccaatcgtctactttgtaatctgtgattttagaagatacgttaatgcctgcacaattgacaaagatatcaacttttccaaatttagcaatcgcattttctacaagagcatccacatcatcacgatacatcacattggttggcgtaataagatagtctccttcattcaaatgttctgcaacacgttgtaacttctcatcattacgaccagctagcacaactttagcaccttcttcagcaagtcgtttggtcgttgcttcaccaattccactactcgcacctgtaattatcgcaactgtatctgttaatttagccatattcatcatcctttattgttgtttattcatccatttccataattctttatacataaacgtcattatcaatttaaagtctcaattatagattgtaatttaaacttaaacgtaataaagtgaagatatatgactataaataaaggggaatagatatgtctgtgattgcgaaagattttagtccattagttcaagcattacgtcaaaaagtaggccgcacaagtttttcatttcgtttcgaagatttatttactaaagaagaatggttaaacatgagtgtcaaagaacgcacacgtcaagaaagagaatttattgcacgaatggatcacattccaaatattcgaatgcctttttctagtgaagagggctataagttcaaattgtataatcaagagtatcaatataacgaagtgaagaacaactttaaatctttataataaaaaacccacatcaagggaagtgagatgtgggttttaacacattatccaaaaatgattgggggtatatttagggtatgccctcgattgctcaccaacgagggcatgacattatacgttcatgaatgttataggaggtcattcaattctgtattttaatttgtaactagtgttttacgttcgagaccatagaagtataaacgttcagcatctaaataagacattgaatcaattgtcatatatccatcttttatatcactaattaatccttggtttacgcctgtttttaaataaatatcgtagctaccttcttcagaaaaaataacgccttctattacctttctcattagtatcactccaattacttattccttacaattcttatcatacacgcttttttttattttaaaaggggtatgtgatgattttcacaaatagttcaataatttaaaaatttgtttgttcattttttcacatgtaagttgaatttaaatgataagtatgttagggaatagaaaaatgcgtgctattttgctccttatcctgtttcctcaagaatggcggagatatagaatgagatatctaggtcttctatttaatttgttttacttcttcttttgttactacaaaccaactttgacatatttcttttaacatattttttttataaatcattagaaagggtctctctttaacattaccaattttccagtaagcctcatttttcttatctttaacatattctttactatctttatttttagaatcttttaatatactattcatcttatctaaacaaatattataataattctctttattaatgttaaatcttttttcaatatcttgtcttaaaacagatttttttatagcgcctaattcaagtttagtgatgttatctgcaaaaatctcttttccagtgttttctccccatataaataagtaactatctgttgaatcatatttatctccaaatagccatccctcttttaattcattattcttattataaaaaaatatttctaatgcgaaggttggtagccctttattaaaatatgttgctgccgctttctcatcaatattaacttttttcccatgaccatattcaatagttaaatctattccacgatgttgttttttagaatcatcggttcttttaatatctttaatttcacaattattcaaaatactatttaaatttttataaaaatatttatctaaaaatttgcctatttctatttctttttttaaatcataatctatattacttttatccattatatacaccaactttatatgtagtttacaattatattattaaattacacttaaattagtggtaataaacaaaaaacaacactaaaaatagtgttgttttaaaaaagttttaattgactaaatttatctttagttagtttttctattttttcaatttgattgccaatccttgtaacgataggaactactagagcatttcccatacaaaagtatctcatgcgatctggcattgtatctgtccaattatcaggaaaaccatttaacctttctgcttctataggagttagagttctatatttttcattaatttttaaaaaatgcgagcttctattaaccgacgcttcactagttaacatggttctagcaggtaagtccaaagcatcgaattctgacattccaccttctgaaaaatagtattcatgaccatctttagaagttctttttatttttttgggacctctcaagtatttaaatttctcaattttttcttccgataaagtataattatcatctacttcatttaagactatttcacctaacgttattgatttttcatatttaggaatagtgtcaattgttaagatgtttccatttttcatgatgccactattataaaactgaaaactaaattcatctgatatttctacaatatcctttgatatggcaatagaattaattctatttttgtttggttcactttgtatcggaaaagcttctgcaaacattccatatttatatattatttcttcaagtgaatgtttatctattaaattagcataatctaaatcttgtttgtagccaaaaataaaaactcttcttcttctttgagcatttccgtagtcagctgcattaattactctccattctacattatagccaagttcatttaatgttgataacatgacaccaaagtctcttcctctttgacttgacggtgattttaataagcggtctacattttctagtaaaatatacttagggtaagtgttttgaataaatctaataatttgccaaaataaaacaccctttttaccttgtataccaagctctccacttaaacttctcgctactgaataatcttgacaaggaaagccacctacaatcatatcggcttttgtttttgccatttcttcatcacttattaaagcgatatcttcattaatatgtactccagttgaaaaattactattataacaatcaaaggcatgttgtatctttttagaaggttcccattgatttgcccaagtaacattaaacattttttcatttgtattttccaaacctaatctaaatccacccactcctgcaaaaagctcagctactttaatttcattcatgagagcacctcctttaacagtattaattaaattataacataaaaagcgaacgatcgttcgctataaatacaaaataaacaatattattttaacataactttctacaataaatcttcaacttgcttttttatatacgtgttatttatccagaaacattgttttgtcatccattgacttgaatattttatcttatcttcaggtctatttatccatttagctggagaaggtagataatctgcacattgtccattttctctgtaatccgattttgattggtgaggtcgaacatgacaaatcatatcatctgaattgttaataaagttattttctattctataaagagatccgtcttttttatatctagcagtaagagtaacacccttttttaatttttctacagtatcttcccacacttttttaataggtccttcaatatcttcttcaggtatagttacaaatttaattcctttaaatacatcattttcactttcgctttttactacaaagaataaaaacttcgtttctagtaaaaaattatgccaagtcgcttgaggatttccattagtatcttcccatttttctttgactaaatcactaaatttaaaagtagggaatgacatactctccttatttatattgttttcattaaattgaactgtttttacgacaatagaagctttttcaaactcttctactcttgggaatttttcatttttttttacttttccttttaagttaagaattgctgaagctattctgtaattaagatttttactttttctttcaatgttaaagtatttacataatgcatcaattgtccaattataataaggtttaaatgtttcataaacaatatcttcaatgcttttatttttcacttcaaatttatctttaactattgaatcaattttttcttctcctaaaatataccttcttaatatagaagtcatatatccagattttaatgaaaaagctctttgtttcgcaagaatatcagaataaggttgcttacgaactgacttagaattagctccctttgtacacggagctaagtaatcagtaaggccttcacttaattcatgtgctctaccttgagttatataatcatgtataatgttccaatctttttttataatttcataatctactggattttttttcatctcatatagaactgcttcttttattttccaatcatctctagcaacatctttaacatattcataaaaagctagttctattgttccatttttataaagaaatgaactatcttcaaatgattctttagctaccttttcataatttataatatttaaaactaatctttcttttgcactataattaccgttttttaattttttaaaaggagttgcttttaactctacgccagcttcttccatatccggacgactttcactatcttttgtttttccaaaccaagcttcaaaggcatcacctaccgaactcttatagcctaacactggagcatcattatttaattctctaattgtttttcctactgcctctttagctctattgtgaactgcttctttagttttatactcactcatataatcaactcactttattattaattaagtttatcttgttttttctaaaaagtgatattattagtcgaattattgctattgcaacatctatgatattcaaattttatattatataataaaaatgtcttaggagaagtcctaagacgctgaggaaaagtttctcagaaaaaaattttctgggatgttgaggatttatgattagagaagtgtttgtcgacaatttatatcttctctaatcagggcacgccttagcggaaaatagggtgtgtcctgtttttaggtttagttttgatgagattgaagtgtctaagaagattgaagaataaccacttgttcttcaatgtcttaggcactttaattattataatcctaaatgtttaataaaagttacaagttcttctttcattttaggatcttttaacgcatattctattgtcgttttaacgaatcctaatttttctccaacatcataacgatcaccatcaaagtcatatgcatacactggaacagcactattcatacgttcaatcgcatcggttaattgaatctcattaccggcgccttctttttgtgtttttaaataatcgaaaatttctggcgttaaaatataacgtcccataatcgctaaattagaaggtgctgtaccttgttcaggcttttcaacaaattgtttcacctcatagcggcgaccttgtttctctaatggatcaataatgccataacggtgagtcacattttcaggcacttcttgcactccaataacagaatgtcctgtttcttcatatacattcattaattgtttaatcgctggctcttcagattctacgatatcatcacctaataatactgcaaacggttcgttaccaatgaattgacgcgcagtataaatggcatgtcctaatcctttttgttctttttggcgtacatagaagatattcgctaaatctgtagaataatgtactttttctagtaagtctgttttccctttttcttcaaggaccatttctagttctttttgattatcgaagtgatcttcaatcgcacgtttatgtttaccagtcacaataataatatcttcaatgcctgcacgtgccgcttcttcaacaatatattgaatcgttggcttatctaaaataggaagcatttccttaggcatggcttttgtcgctggtaaaaaacgtgtccctaaaccagccgcaggtatgatggctttctttatctgtttcaaactcgaatatctcctttgcgcattctgtcttttatattataagtaagtttatcattcttttattgtcattcatagcgattgactgtattctttcatgatataaaaaataagaagcaagattgaaatttaatgatttctctctcacttctttgataagttatacaaataaactaatgaataagataaagatgatgcccgatactgaaatgatggtttcaagtaatgaccaagttaagaatgtttctttcacagtcaatccgaaatattctttgaacatccagaatcccgcatcgttaacgtgtgataagataacgctccctgcaccaatggcaagtacgacaagtgccacattggcatctgaatgttgtaataatggtaagacgatacctgttgttgaaattgctgcgactgttgctgaacctagtgcaatacgtaatactgcagcgacaatccatgctagtaagataggtgacatagttgaaccttcgaatagcttagcaatcgtatcccctacactgccatcaatgagaacttgtttaaatgtaccgccaccaccaataattaaaatcatcatcccaattgggtaaatagcattcgttacagatttcataatgtcatccatttttcttcctctatgtaagcccattgaaaaaatagcaaagatgactgaaattaacatcgctgtacctgctgtaccgataaagtaaatgatttgttcaaacagatttttagcagtttcatgtccagtcactaattgaacaaccgttgataataacattaaaataacaggtaatacagcagtgagtatacttaaaccaaaacttggcatttcagatgctttaaattctttttgtgaaccaagtgctgaaatatccccttcacgtgtataagcagatgggatgagtttttgtgcaaatttattaaagattggacctgcaatgagtgtcactggaatggcaataataatcccatatagtaacacatgtccaatattcgcctttaattcttttgctataactactggaccaggatgtggtggtaaaaaaccatgtgtcacagataatgctgttaccataggtaatcctagcttcaatggtgacactttcgcacgtttagcaattgtaaaaacaagtggaatgagtaatactaatcctacttcaaagaataatgcaataccaacgatgaaggctgcaatcaacattgcccattgaacatgtttttgtccaaatttatcaatcagtgtatccgcaatacggttggcgcctccaccatctgccagcaatttaccaagtatcgcgcctaatccaaaaatcagtgcaatatgacctagggtgccgcccatacctgcttctatcgtttccattactttatttaaaggcatgcctaataagatggctgttacaatagatgtaataattaatgaaataaatgtgtttagttttaagaaaataatcagtgtcagtagtaatacgattccaatgaccacacttgctagtgtccatattgttcccatttgtcttctcccctttaatgtttcatttatttaaatacgtcgattaattcatatgtttacgttgaaaatctgcaatttcttcatagcgatcttcaagtgtacggcttaaatttatgaatatcgttacaagttgttgatacatatttactgtatcttggttgggttgatgtgcataagtcgtaccaaccatattttcgataattgaataatcttcaatatctcccaatgcttttaaaccaaggacacacgcacctagacaagaactttcataactttctggtacgatgacatccgtatcaaaaatatctgccatcatttgacgccatacttcacttttcgcaaagccacctgttgctttaatcgtatttggtgtttcattcattacttcgataagtgctaaatagacggtataaaggttatacaacaccccttcaagtgcagcgcgtatcatgtgttctttttgatgtgacaatgttaagccgaagaatgagccacgcgcattcgcattccataatggtgcacgctctcctgcaagatacggatggaaaattaagccatctgcacctggcttaacacgactcgctattttagtaagcacatcataaggatccactcccaagcgttttgctgtttcaacttcactggcgagtaattcatctcttaaccatcgaagaatgacacccccgttgttgaccggtccaccaatcacataatggtcttcatctaagacataacagaaaatgcgacctttataatctgtacgcggcttatcaatgactgtacgaatcgcacctgatgtcccaattgtgactgcaacttccccttttttataactattgacgcctaaatttgataacacgccatcacttgcgccaactacaaccggcgtattttcatcgatgcccatcaatgtggcataacgttttttcatcccttttaaaatatgggtcgttggtacaagttgaggcaattgagaggctgaaataccgagtaattcaagtgcttcttgatcccagtctaattgctgtaagttaaacatacctgttgctgaagccatagagtgatcaatcacgtattctccataaagttgatagaaaatatatgttttaatatccgcaaacattgcagtattttgataaatatctggttgttcatgtttcatccaaaagattttagagagtggtgacataggatgaatgggtgtacctgtccgtttataaatgtcatgtcccccatattgttcatttatcaagtcagcatattgattcgcacgattatccgcccaaatcatgctttcagttaaacgctcgtgttggctatctaatgcaattaagctatgcatttgcgcactaaaagaaatgagtttaatatcttctttatgtaccccagattcgcgaatcacatgtttgactgtcattaatacggcatcgaataattcgtcaggattttcttctgaaacatcaacatttggcgtatgtaatggatagccaatattatgctttgtaataaattgaccttgttcatcataaagtactgacttcgtacttgttgttccaatatctactccaatcatgtatttcatatgtattccttcttccttctatttattgtaaccaaaagctttcaatatctttacctacatcatcaaagtttaaatgaaacgcttctcttaacgtatccgtatcataacgttctaccgcttctataaatatcgaatgattacggtgtattctgtcaaaatcttctttatttgttctcattcgctctctcattgaacataatacaagtacttctacaatgggtttcaaatgattccaaaatgtttgaagataatgatgttgagaggcatgaatcaatgcttcatgaaattgaagatcatgttgcgtaaaggattcagcatcttcaaattgaacagcgactttcatcatttctaaatgttttttcatttctttaatcactttttttctatcaatatactttaattttgaaaatgcaaaggattcaagcattaatctcaaatcatataattctttcttttcttgttcaccaaattcaagaacccttgcacccatacgttcgaggtgaatgagttgattcgtttgcagcaatttaaatgcatctctaactggagagcgactgacatcgaattgtttagccacttgattttcagttagtaatgtatcgggttcaagcgtactattaacaatctgaaacctaagttccgcagcgatactttcccctgtagtcattctgtttttccattgtttcggataatgttgttccatcttttcacctcaatacgttaacttgtatacaagtatagtaatacaccatttcaaattttgcaaacgcttacttttttgtaatttaaaacacctagctcattataagccaggtgtttattacgattcgttttggtatacttcgatacaataatgtgtttgatggcagttaggacatgttaattgtcttgttttaggtgtatgtttcgcttttacgaaagcacctaatgtaggtttaaatgtatggtgacaattcggacacagatataacaccttttttaaatatattgctgtcagcacaatggcatatgtgattaagatgggtaatataacaatcaatggcttaattgaacgtcttaatagacttaatagcaaaccactatattgtatgatccctaagatgccaacacttatccaaatcttttttctaaagtatgttattttatattcttgtttcatagcatcatcaatatcagtaagatggtttataggcgcacttgactgttcagaaatgtatgtttcgaccttttcaatttgatttaatgtatgactgtacatctctacttttgaatgtaacgcatcttttctcaatgaaagtaatgttttaaacgtgttcatatttgtatcttcatcaagtaatgtctttatttcatctaacgtacatcctaattgttttaatactaaaatcagttcaagctgctttacatgttcgtcagtataatatctgcgattagagtcagtttgtcgatgagctataagtaatcctcttcgatcgtaatattgtaatgttcgaatcgtgactttactctgttttgccaattctccaatcgtatagtgtgacatatcattcacctcctactgttaacatagctaatgacgctacgtcataagcaagtatgattttaacatttgcttatgaagtctgccggtggtcttattcttcttgaatccactgtttaatgtggtcaataatacctatcgtgccattaggcagattatccaagacagcaggaaagtcgatatgtccgataccagaatatacgacctcatttacttcaccgccatattttttatacattttcattgtttcttgtgaatccgtgtaaggaatgatttcgtcatcttctcctgagataaataaaagtttaggaaattgttctatttcttctatatccggaaggtaatctgcgtttgtagaataaatgatatctgtaataatcgttttaatgggtgcaatatatgaaaataaattacgaatgctattatttttgttatgaaaagattttttcaaaatatattgcggtaaatttttaaaagcaatcatctcatctttaaaatgatctcttttactatttgaagtaaataaacgtgacaacatgctttgatttggtgtaatacgtgcggcactatttaaataaaccagatgtgaaataggcaaagtattaaattttaataagcgtgtgccaatcatccctcccatagaataacctatgataactaaatttttaataccgtatgtttctataacttgtgaaagcacatcattgatacgctcagaataatcatctaacgtatgttgttctcttacaatgttagagcttttgcctctacttggacagttaacaaaaatcaggttgttgtctctaaaataaggttcaaacaacaacataatgcgatatgtcatcattgctccatgtataaatacgatggttttatctgcatccttatttccggcaaatgcgacttcaatgtgttcacccttaaattgttttagttcatatcgttgtgacttaaaattctgctcaatcattttaaaactccaaaaaatatatattactattcatttattttatcataaaaatatatcattttatcttacataaaaaagcgaaacaatagctatacgtttctatcgtttcgctatattactaaactatttatctttatcttgaatgtctgagtgaatggtttgcatttttgcttcgacatctgagatttctactgcacattctttaagtttatctttatagtcctcagtattggtattatttttataacgaattttatgttctaaacttgcccacatgtccatacctattgttcgaatttgaatttctactggtgtagcctctactctatcggctagaaaaactggaatcgacacgactatatgaagactgcgataaccattttcttttggatgttcaatataatctttacgtttaagtaatttaacgtcctcttgttttaataataacttctcaatcacataaatatcttcaagataattacacaccacacggataccagcgatatctaaaatattggctttcgctgtttccgcatctatagttaaacctttacgttgcaattttttaactaaactcgtcatttctttgacgcgacgttccatatgatgaattggattatgtttgtaaatatgattaaaattgtcatctaaaatatctaattttgtactaatctcttttaatgcagaagagtataaatgatcgagttctacgaaacccacgagtttatcgaatgcttcatctccattcttaaacttattaatattttctttgaattcactgcgtaactcttcaatgtacaatgatggttttctctctacgtacatatttgttgcctcctttaatcatcactgtatattatatctaactcttaagtgaactaaaaatgataacctagactttacgctactcatttagtctgagtcatttagtcataaaaaaagccgaatagcaggtttaattgctactcggactctatacattactcatctttttgatgttcaatcacttgcgtaccacgattatcagcaatttctttagcacgttgttttgcttcttttttagtactaaatgtatcagacgcttgttttgcatcttctgttttgactttccattcatgatcttcataatatacatgaacatcttcatcattcagttcaggtcgtgctgatggatctttttgatgttgagtaatatgtttatgttttaattcttctaattcttctttactggcatctttgtaccacttttctgcttgttttgttgcaataggaatagcgtctccctctttgtagccatcttttaacatcgcatttgcaatatcaattgcttttttacgctctaattcatctaaatgtttccaagtttgtggataatcattcattgtccaaggcatgatgtcacgctcctctatagtgtttagtaagctttaccaccctatgctataatgaaacgtcatacattgatattaagcgtccaccgttttctgatgatttgtatgatcaacgtctttacgtgttgctacacaattatcttgtaacttcattaaggcagattttaaataattatactgtggtaaatccgtcaattctttttcattaagactaccgcgtaattcaaaatgttttgctacattttcaaatgtgacaagatattctcccatttgtttttctgaaatgcgttgacgttgtttgtcttgcattgcacgcattaacataaagctaatttcttctaaggcaaaaatacttggataataataacgaatggcctctttacttgagaataattcaccattggctgaattgtacacttgtgtcatgttattcatttttacagataatgataaactttctgttctatcacgtgctgtatcttggtatttattttctgaaaataaatattggaaaataaccgcttctttacgtaccacttctgcaatcacagtaggtaacatggttgacgcattttttcgattaatgattaaaacaccaatgaccgcaatcacaatcccgatcaatacgtcaacaattcgtgtatacgcaatatcaatggataaattaccagaggctaaaccatttaacaggatgacttgtgttgtaataaaaataactgcaaaagcataatttgctgcgacaaatccttctgtcatcatagcagacagccccattaaaatgactgcgacaattaaatgaggttggaaaaagagtatggctgatagaagtaaagtccctacaattgttccaagaccacgtgctaatgaacggtctaacatccgaatcgtcgttaatcctaataatactgtatgggcggataatggaatccaatatgaacgttggatattgaaaaataacgagacaaaaatagctgcgcccataataacagcatacgttaatgcattgcggaaaataatggaatcgagtgttaagttttgaacgatacgtttactatataatggcttacgaatactcgcttcagattctatttgttctggttgtaattgtgcaatttcgtctattttaagtatgtgttgcatcaaactttcaaatggttcatccacatcgacttttttcgtccatttttctcgttttgaagataatttataggcatttcttgtaatcatatccatcatctcaatcagttcttgagggatgggacgaatatttttttcatttagttcaagtaactcagcataaattccttgggctgacgtatgcagaagcaataacttttcaaagcgagaacttaacttttcactcatcgcagtagtcgatgtaatcaatagtttctctgaatttttaaatttcgttactgtgtcttgtgaaatgtctttaaatttttcagcatcattaaagtgatgcattaaattattaatcgtctgaaagtcagaggtaatcgctcgatcttcagctttttgtttttggaatacaatagttaaaatgacgactaatgtcgctaacattcctccaataaaaatcgctaagccacgaatcggtgcttgttctggagcgtcaggtaagttactggataagcaaaatgtaactaaaaagaatgtggatgaaggacccgcaatttttaacacattaaatacatagaatggaatgacagtaacgattaataataatacgccgtacagaactggctgattgacagttaatgttccaagcatcatacaaatggtaaaggataacgtacaaataatgactgttcttaacatggattgtgctgaacctttaaatacataagtatgtgccaaagttccagttgctacgagtagaccaaaactaaaatgtcctagtaaataccctatcaatgttgggataatcattaataatccttggcgtatacctttccatagattaattttaggcttatcaaaccttattaatgaagcaatcacatgtcccactactatctttcctttcatttttcatacatcttatcataacatgaaaaacgccttgcctaagcacaaatatcacttagacaaggcaagtttagttattattttgtttctgctacatcaatgacaggttcttcagcgacatattttcctatattttcactaaatgctttgaaatgatctgaatggttatgtgcttgaaccgcttcttggtctttataattttcaacaacaacgaatgtgttgtgttctgctacatcttcataatgagcataaaatgtattacccggttcttgacgtgaactttgaactaatttgttcattaaatctaaatagtcattacgcacatcttctttaattttaagtttcgcattaataataatcatataatcaccttccaaatataattataacgttttacccggatattataaaaagaaaacagtaggaagaagcgcggtaacattgattttcaattcaatcatcgacagtcaatatattaaaaatgcctgagacaactgatgatgtctcaggctttcacttttgtggataatgtgtaaattttatttaatatgtctactttcgtctttaatcaatggtttgtctggtgtaacgaagaaccataatacagctgcaatcaccgctggaataattaataattggaatgtcattgtccagccaagtgatgatactaatgcacctgctaaaaatggactgattaacgcaccaatatttccccataagttcatccaacccgatactgtaccagcaaagttacgtccaatatcatttgctgctgcccaactcattcccattgaaatacccataccacctaagccaagtgataaccaaaagatggtcacatataagttttgtgtatgaactgcaaagaagatggagatagcaaatacgataaagccaacaattgcaattaaccctctcgctacaaaacgactttgaccgctatgcaaaattttatctgaaatcgtacccgcagataaaattaaaataaacataataaaccatggtaaagcactaattgtcatatctttaaattgtacatgatattgctcagttaaataagtaggtaaccagattaagaatagagcaataacaaattgaactacgaaatattgccctgcaatagcatagaaactcatgcgtttaaaaaattgattccaaggtgctacggatttagttgtttctactaaatcacgatgttgcatgatatactgtttttctgcttcattgaccatgcgatgttgctcaggtaaatctttagcaataattgcccaaagtgctgcaatcacaataccaaccgcaccgaaaatatagaatacagcttgccagttaaatgcattaacaattgcgatggtaactactggtgctaatactggaccgaaatatgatcctgctaacaacgcactcgatgctctccctttttcatctttagcaaaccaagttgaattgaatactgcattagatggatacattggcgcttctccgataccaaataagaaacgtactaaatataatagaccatgatgtttaatcattcccgttaaaattgtaaatgcactccaccataataatgcgattgaaatcatcttacgcggaccaaacttctctgctaacatacctgaagggacttgcatcaatgcataacccagtgagaagaatgaagctaataaaccaaattgttgctttgtcatgtgaagatcttccatcatttgaggtgcaataaatgagatattagatctatccatatatgcaataaccccaataataaagaatgcgatagcgaaataccaacgaaccttacttttcttttgtctttgtaccataattattttccctgcttccctttaaaattgtgttgattctacttatacgttgacaatgaaaactcccaatcacgtctttccctgttgtttccaaccgcctttcgagcctcatctcataggctttctgatatattttttataatattaacaggttttgcaagcgtttacaattactttttgaatattttttatcttatttatacatgactatataaaatgtgttttactgattaaaaagtatattgctacaaatctaatttgtttttgtatttgaactctattaaaaaaggttgtagaataaaaatgaagcaaaaatgctgatgtttattttaaacacaactgaataaacgatccactggaagtgcctttgtttaaggctgagagtaaagaacgaactttataattcctggaacctgatccagtttgtactggcgtaggaaagtggcgactaggatatcataaagttaagcaaaacgctatttccctactgcagggaaatagcgttttttgtttactaaggagtggtgttcatttttatagcgataacgaaatataaagatttaaccaatgatgatttacaacattttcttgatatctcggatggaatagatgggttattgtttcgtactcccatgtcatcaagtgacttgtcttcatttttaaaaacacttatagaaaaaggatttcataaatcaaaaatcattattcatagtgatgtacatttacttgaacaacttcatctctctcatattcattttcgagaaatggatgaagatgcatttagctataaatccatacatccagagattgaagtgagtatgtctacacattcaattgaatctgttaaagcagcttatgaacacgatcttgattatgttttttttggacacatttttaagacaccttcaaaacctaatcaattgcctcgatcaaaagcagagattcaacgtgtgctagagattcctattccaatttatgccattggaggtatcactgaaaaaacgattcctcaattacctcatggttttaaaggaatttgtgcgatttctttttttatgaacgcatctttacaacaaattgaagtgttgcgaaaggagtggttgaaagatgcatgatgttttaatcataggttcgggcgtgattggcatgtctattgcgcgacaattaagccaatctcaccttgacattgcacttatcgatcgtgacgtgccaggtaaacacgcatcatataaagcaggtggtatgttaggtgctcaaaatgaatttactgaagatactgatttatttagacttgctcttgaatcacgaagtctctttccacaattatgtcaagatttagaagatgagacaggtattgatattcagtttcaaaattcaggattaattaaagtggctaatcgtcctgaagatgttgaaagtttagaaaagcagtatcaatttttaagcggtttagattctagcgtcattgttctttcagatgaggaacttactcatttaacgaatggtacagtaacatcaagtgaaatggctatttacattccacaagatggacaaattaatgccaatcactacactaaagctttatttacagctttaaagcaacgtcaaattaagcgatattttaatacagaggtacaatctgttcatcgccaaaatgggtactacgatgttgaaacgtcacaaggcacattacaagctaagaaagtcattgtggcagcgggcgcatggacatctaaattattaaatcaatactcattacctagagatgtagtcggtgtaaaaggtgaagtcttactgattgaaaatgatcatttggatttaaaagaaaccgtatttatgaccaatggctgttacatcgtaccaaaatatccaaatcgtttcttaattggtgccacaagcgagtttgataactattcagttggtaatacagacgatggtatctcttggttacaccactttgcaaatgaacgtataccagaactcgcacacggcaaagtcattaaacaatggtctggtgtccgtccatatactgaaggagaaataccgataatggaccgtattgatgaagatttatatgtgatttctggtcattatcgtaacggtattttactttcgcctattattggtcgtgatatcgccaattggatactcaccggtgttaaaccgcgtcgatatgaatcatttagtgcttcaaggaggttaaatcatgaagtgtatcattaatggggacacattcaattttgattcagaacaatctattacatctgtacttgaatctcttgaattagatcctaaacgtgtcattgtcgaacataataaaactttaattaaacaagaagactacgatcaacatacagtacgtgaagatgatcgattagaattattagaatttgttggaggcggataaaatgtttaacattggaccattagaaattaaatctcgtttattattaggtacaggaaaatttgaagatgaagctacgcaaacaaaagcgattgaagcagcagaagcgaatgtgctgacttttgctgtaagacgtatgaatttatatgataaaaacttacctaatccattagcaaatattaatcttaaagactttattacttttccaaatacagccggcgctaaaactgctgaagaagcgattcgtatcgctgaaattgcaaaacatgctggcgtatgtgacatgattaaagtcgaagtgattggtgacgatgaaacattgttacctgatccatttgaaacatatgaagcatgtaaagtgttattagaaaaaggttatatcgtatgtccttacatttctaatgatgtcgtattagcgaaacgtttagaagaattaggtgttcatgctgtcatgccacttgcttctccaattggtactggacgtggtattaataaccaacttaatttaagttacattattaaaaattcaaatgttcccgttattgtggatgctggtattggttcaccaaaagatgcgtgtcatgcgatggaattaggcgctgatgctattcttttaaacactgcagtttcaggtgcaaaagaccctgttaaaatggctgaagcaatgaaacttggtattcatgcaggtcgtctctcatatgaatcaggacgtattccagtaaaatatacagcccaagcatcaagccctactgaaggtttaggattcttataatgcaacgctataaccgtcaattgcgttaccatgcatttggagaggatggccaaactgccctctccaatgcaaccattttaatacttggtgcaggcgcgttaggaagtcacgttgcggagcttttagcacgtatgggtgcacatcatttagccattgtcgatatggatatcgttgaattatctaatttacatcgtcaagcactctatactgaagatgatgctcatcatatggtccctaaagttcacgcagttaaacaaaagattgaacacattaattcaaatgtaaatgttcaaacttattatcaagaaattgactctacaactattgaggatattttaaaagccgtcaatcctgatattgtcattgatggtatggatcatttcaaaattcgttatcttattaatgaagcctgtcacaaacatcatattccgtgggtgtatggtgctgctgtaggcagtaaaggtaccgtttacggcattgatttcaaaggaccttgtttgaaatgtttattaaaacaaattccaaccagtgcagagagttgtgctattaacggcgtattaccacctgtgattacacaagtagcaagctatgaggtcacagaagcgattcgttatttatctggtcatggattttctcataagttaattactcttgatgcatttaacattgattataaagcaatgaatatcgatgttttaaaagatgctgaatgtgacgtatgtggtaaagctcattacgaattattagaaacgaaacaacaacagaagattgaaagcttatgtggaaaaacctatttatttagatatcaacctactgcttttgactatgctgaacatttcccaggtgatattgtaaaatcaacctcatttgcaaaactaattaaagacggtaattatgaaatcaccttattcaaagatggtagaatgaatgtttatggcgttgaagatgataatgaagcagaacaattgtatcatcaatatttaaaggccttaaaataagttgtacaatccatataatgttataacaagcaattcatagtaaattcctatataatgaatttactatgaattttttattcgagtaatgtttaataacggaggatttttaattttataatggaacaaattattaccaattttataggccaatggggctatgcagccatttttattcttattttattagaaaatgtcttacctgttgttccttctgaaattatattaacatttgcaggtttaatgtcagttaaatcaggtctttcaattttagttttatttattatttcaacaatcgcttcatttattggtttacttattttgtattatttatgtcgtttaattaaagaagaaagtatttatcgatttgttgataaatatggtaaatggttcaaacttaaaggaaatgatgtgaaacgtgctaacgactggtttaaacgttatggtgcgtgggcagtgctattatgtcgtttcattcctgttttacgtgtattaatcactattccagcaggtatcaataaaatgaacgttgcaacatttacgatgttatcattactaggtacaacgatttggaactttgccttaattttacttggtcgtcttcttagcgatagtttcgacgtattaatgtctggtattcatacctattcttactttatgtatgtgattcttatcattattattctatatgtactctatcgtctattcttcaaaaaaaataacgctaaataagtacattacttttactttcaaattaaatttacaacaatttaagcatcactgttgaaaaagtgatgctttttaacgataatttatgtaagcggttttattactcagcttactatttaataaatttcccatacaggagtgaaatcaaatgtctcaatctacggaaagtgaattaaagaaaaagtatttagatttactatctcagcaatttgatagtcctgaaaaacttgcaacagaaattattaatctagaatccgttttagaattaccaaaaggtactgaacacttcgtcagcgatcttcatggtgaatataaatcgttccaacacgtattaagaaatggctctggtaatgtccgtgctaaaattaacgatatctttgcaggtaatatatcccaaaaagaaatagatgatttagctgcgctagtgtattatccagaagaaaaattaaagctcattaagaatgactttaattcaaaacgtgagttaaatgaatggtatatcttaacaatcgaacgtttgattgatttaatcacgtattgttcttcaaaatatacgcgttcaaaactacgtaaagccttaccttcagagtatacatatatcgttgaagagttgctttataaaaataacgaatttaataataaaaaatcgtattatgaaacactcttaaatcaagttatcgagcttgagcaatcagatgatttaattattggattatcgtataccatccaacgtcttgtcgtcgatcatcttcatgttgtgggtgatatctacgatcgtggtccagaacctgacaaaattatggatacattaattgactaccattctgttgatattcaatggggtaatcatgatgtactttggattggagcttatgcaggttctaaagtgtgtttagccaatttactacgtatatgtgcacgctacgataacttagatattattgaagatgcatatggtattaatttaaggcccctcctcactttagctgaaaaacattacgatggtgataacccagcgttcaaaccgaaaaaacgtccggataaaaaagtgggcttatctaaacacgaagaagcacaaatcactaagattcaccaagccattgcaatgattcaatttaagcttgaaatgccaattattaaacgtcgaccaagttttgaaatggaagaccgtttagttttagaaaaaataaattatgatacaaacgaaattacaatttatggtaaaacgtatcctttaaaagatacttgctttagtactgtggatcctaaagatcctgcaacattattaccagaagaagaagatgttgttaataaattattactgtctttccaacaatctgaaaaattaaaacgtcatatggcctttctaatgcaaaaaggtaaattatacctcccttataatggtaatcttcttattcatggttgcattcctgtagatgatcatggtgaaatggaagcttttgaaattgaaggagtaaaacataaaggccgtgatttattagatgtctttgaacgtcacgtacgcttagcatttagcgacaaagagaaaacagatgatttatctacggatcttgtatggtatttatggacaggtaaatatagttctttatttggtaaacgtgccatgactacatttgagcgctacttcattgaagataaagcgtctcataaagaaccgaaaaacccgtattattacttacgtgaagatgtagatatgattcgcaaaatgctaaaagatttcggacttaatcctgatgaaggtcgtattatcaatggacatacaccagtaaaagaaatcgatggcgaagatcctattaaagccaatggtaagatgttagtcattgatggtggattctcaaaagcatatcaatctactacaggtatcgcaggttacacattactttacaattcatttggtatgcaacttgtagcacaccaattctttgattctaaagagaatgtcttatctgatggtgctgatgaactatcagtacgacgtgtcgttgatgaagaattacaacgtaaaaaaattagagatacgaatgtcggtaaagacattatggaacaaattcgcatgttaaaattattaatgcacgacagatatttaaaataaacctataataatgcccggcgacatttcaaatgaacggtcgccgggcgcttttattattgatatacgtttcttaaaataccatatgttccattatcatattcatccattgattttgtactcctatggaatgttgcttctttatcgtcactaatgtgataaataatcatatctttatctgtaatatcatgatatgaagaagctggaacttcgacaatattttgattagtaatcacattgtcaaaccatcttggactgtgcttttcatcaaataaaatatgattacgaagcggtccatttaaattattacgtgcttgatcatctgtaaatgatactggcatcatatttacattatttaatccaaattctggaactaactcattaaatgcaagactattaaaaataaatgatttagtcattaataagcatttgttatagcgaattaagtctgcatacatacgatcactacttgataataaatttcctttaaaaatttcaaaaccgagttcttcagctttatcagaagtgttactaaacaagttaaacaccataactggaataccatgcgattgtaactgtgtacctaagtgataagagaattcgctctcacctactaaaatgacacctggaggttcagtacttgctaaaccaagcattttacttattggtgtaaagctaaaaccatatataactacggtaataaatactaaaccaaatgttaccggtgtaatataagatgccattttcatattatcatttaagaataatccaccgaaaaattgtgctacagttagtacaacaatccctcttggtgccatcatgcctacaagcgcacgctcttttttagtgatttcagtaccgattgtagataataaaacagcaattggacgtactaacacaatcatgacaagtgagaaaatcacaagcttccatgataatacattcatcaatacagatggtgttaatgatgatgtgattaaaataaacaccgttgaaactagaatggaagacatattttcaataaaatgatctgactctttataaattaaatcatgtcgtttataacgtgccatcattaatccaaaaatagttactgccagtaaaccagattcatcgagaatttggtcacagatactaaacacgagcaatataaacaccaactgaatagaaggcattaaattttgtggtatgacatcgcgttggatgagccaattgaagaagaatgaagcaccaaaaccaattaatgctacaaccaacattttaaaaataaatataaagagtaattggaaaccaaaaccttgtccaattatttgatacacataaaatgcagctaatgctagtattggaccaagtggatcaagtataatactttcccaacgtaagacagtatctacactgtttctaactttggcttgttttaacagtggctgaatcactgttggtccagtaataagaagtaatcctcccataacaatagcgatagaaataggaaaacctaaaattttatgtaaggcaatggcgccaagcacccatgcaattgtggcgcctagcgtaataatacgtataaccgccttagaaatgccttttaattctctaaaatctaaattactacttccttcaaataatatgattgctaccgcaagagatacaattggactaaatacctctgaacctagcgtatgctcaggatttgctagtcctaatatgggtcccactaataaaccaacaatcgacattactacaatcgaaggccatttaattcgatttgctaaccattgactgaagatacctaatgcaagaaataatacaataactagcattacaggtaaatcaaataacatatctacaccttccttatttaaattgaatatattgcaatatcctatcaaactttactgaatactgtatagtatatttattacattttttaataacatttatatgagaactataaactattatataccccatataacttaaaatttatacaaattctttcgaatgtatttttgagaaatacaatgttcattacaagtaaactttaatatttatttttaacaaaatgtcctttaaaatagattaatatattctcatgtgtttgatttagaaaggatttttaaaaatgaaagttttaaaagaatcgatgatcgtagcatttgcctttgtaggtgttgtcgttggtgctggttttgctacgggtcaagaaatattccaatttttcacaagtaacggtcaattcagtgtattagggattattattacaggattaatcatcacacttggcggtatgttcgtcttaaatactggttacaacataaaatcacataatcattcagaatccattcattactacttgcatcctatgattgctcgattatttgatattgttctaacattattcttgttttcactcgctattattatgagcgcgggcggtgcatctacaattcaagaaagttttcatttaccttattggcttagttcacttattctcgtaagtcttattttggttacattatttttaaaatttgatcgtttaattgcagtactaggtatcgttacacctttcttagttatcgtcgtcacaattattgcgatatattatcttgcaactggccatcttgactttgaaagtgcaaatcaatatgcacagcataaatcatctatttcacttggatggtggtttgatggtatcaattatgccagtttacaaattgctgctgccttcagttttctaagtgtaatggggggacgtttacatgaccaacgtgcttctatttggggtggattaattggtggcgtcattattacatttttacttttaatgattaatttaggcttaattacaaaatttaatgatattaaatccgtagcgcttccaaccttattattggcacgacatatctcacctattttgggaactatcatgtctattattatgattctagttatttataatactattgtaggcttaatgtacgcattcgcctctcgtttcacaacaccgttttcaaaacaatattttgtacttattatcgtcatgacaatcgtgacgttcatttgtacatttatcggctttatttcactcattggcaaagtatttccaattatggggttatttggctttattctactcattcctattttatataaaggggttagacattttaaatattcaaaaaaagaaggttcaaagggagcacattaatctccttttgaatcttttatttttatagattaaatttaatactttacgggaataataggtatggaggtgtcgttaatgaccaatcaactatttattaataatgaatttgtagaaagtaagtcaaacgaaacaatggacgtgattaatcctgctacgggagaaacaatcgatacgattacattcgctactgaagaagaggtaaacgacgcaattgaaaaatctaaacacgctcaacttgaatgggaaaaagtaccagctcctacacgtgctgagcatgtaaaattattaattcctttacttgaacaacataaagatgacattgctcatttatacgttaaagaacaaggtaaaacaatagtacaagctaaaggtgaaattgataaatcaatagaattcattgattatatggcaagtttaagtatgagtaacaaaggtgaagtattacaaaatagtatagtaaatgaaactattcaactgacaaaaaaaccaatcggtgtgacggctggtattgtaccttggaatgctccaattttagtgcttatgcgtaaagtgattccagctattgtaacgggttgttctgtcgttatcaaaccaagtgaagaaacaacattattaacattaaaaatcgctgaacttttccgtgattcaactattccagctggtcttattcaaatcgttccaggtactggcgaaacagttggaacacaattggcaactcataaagatattcaacttgtttcattaacaggtagtatgggagcaggtaaagctgtattcaaaaacgcagctgacagcattaaaaaacttaacttagaactaggtggaaatgcgcctgttcttgtcacacaacacgctgacttagataaagctgttgattatatcgttactgcacgtattaataacgctggtcaagtatgtacatgtccagaacgtatctttgttcatgaagatgtacatgatgactttattaacaaagtgaaagataaaatggatgcgcttcaagttggagatccatatgatgaaaacactgactatggtgcaatcattaatcaaaaacaattagatagtattgatgataaagttcaagaagcagtaaaaaatggagcagatttagtgttaggtggtcataaattagaccgtgaaggattcttctacgctcctactattttagatcatgtaaaaacgactgatagtgcttttaaagaagaaatttttggtcctgttcttgctataactacgtatacaaactttgatgacgttattgatatggcaaatgatactaacgctggtctatcatcttatattttctctgaaaacttaaaagaaattatgacagctactgaacgtttaaaatttggagaagtgtatgcgaattgtgaggcagaagaagcagtcaatggttatcacgcaggttggagagaatctggccttggtggtgcagatggtattcatggttttgaagaatattacaatacaactgtaagttatattagatggtaaattaaaaataaaaaaagagagcaagaaagaatggcgttacattcttttttgctctctttttatttatttaatgctttatcaagggcttgaatattttttttcataatagattgaaacgtgagtgtttggtcttctgattgagattgagacaatactgctaaattattaaaatttacaggttgtgtttgtgtctcttgacgaatcacatcggttatttttgaagaaatattttgttcatataaaatatacggttcatgtgtgtcttttatttgattaatgagcgctaagatgtctttctgacttggctctttattattcataccactaaccccttcttgttcgaagtgataacgtcgcgctaaatatcctaatgaatcatgagaaataattactttatctcgtttaggacgcgtcgttatattagataatgtatggtcaatttgttttaaatcttcaactaattgtttatagttatgctcataatatatacgatgtgtaggatctttgtgaactaaatcatctttaattttctttgcgaattgttgatctagtactggatcaagccaaacatgaggatcatatgatgttgcttcatgatgatgtccatgttcatcgtgatcatcgtcttcattcacaaggatttgtttatttaaactatttgcaaccgccaatttcatatcattattattcattgattttgtaattttagccgctactggatcaagatgatcacttgaataaacaaataaatcactctttgcaatattaatcatatcgcgttgactaggttcatatgtatgtatatcagcacccggtggataaatcgtatctacatccacatatttaccaccaatttgttttgtaaagctttcaaacgcaaaaaccgtagtataaattttcaatttattctcagttgttacttttttatgtttgtgagtgatatcgcgatttgtactacaagcagataatatgaggcacaaacacattaaactgatgattgcgatcatcttcttcacacaaacccctccaaaacgtaataatttcgttctcaactatatctgttcttttataaaaaagcaatgactttgtatttaaattttttataatttttatattctaaattttatttatgtaatgttttaatttagcggaaatgtgataaataatactaagacattatataaggagtgaagtaatatggctgaagaaattaaacaaggtaacaataaattttatgtaggtgaagacgaaaataatcctaaagcagaaatcacttacaaacaagtcgataacaatgaaattgaaattgatcacactggtgtatctgatgaattaggtggtcaaggtttaggaactaaattagttgacgcagttgtagaacatgctcgtcaaaataatttaaaaattatcgcttcttgtccatttgcaaaagatgtattagaaaaaaatgatagttaccaagatgtttatttaggataaaagtaaaatatcatcctctagagaatgattctctagaggattttttaatcaagttatttatcttgtctcttagtaactattctagtatatttaatatacttagtataaaaaagagaggctatgatacatgactacatttcattcaaaagaagcaatgcaagtgacgaacgtcactttaaatgttaaagatttaaacaaaatgaatcacttttattctgaagtactcggtttttctattaaaaagaaaactggcacacaaactatttttaatgttggagaacatggtcacacgttaacgcttcatcttttagatcatggacgtcatcctgaatttagagaagctggcctttttcatatcgcttatttattaccttcacgacaagatttagctaacttcctatatcatatgagtagtttaaatcagcctgttggtggcggtgaccatttagtaagtgaagcactatatttcaatgatccagaaggtaatggtattgaagtctatcaagatcgcccttctagtggttgggaatgggagaatggctttattaaaatggatactcttgaagttgatgcacaagatttaatttcacatcgtactgaaaatggttggcaaggttttccatcagatggaaaactaggacatctccatttaaaaacacataatttggtagaggctcgtcaattctatattgatcaacttggttttgaacatatttcaaatctccctcaaagtttatttatttctacacaacactatcatcatcacattgctgtgaatacatggcaatctaatcaagtgaatccagacaataaaaacacttatggattaacacatattgatatctatcaacctcacgctaaagaaacaaatttaacatcacctgaagggtttagtatgactattcatggagatgtgagtgtggttcctgattaaaaaaggttggatgacaatcatccaaccttttttaatctacaatatctcgatattttcttacagtatcaaagtcactatcttttgctttttcataaccttgatgaccataaatatcactaataatctgtttacctttttttgtatgacttatattaatgaatgcttgactaattttatttttccatttgttactcatgtcattacgtactgaaatggtatcattaggaattttctttgtacgataaatcactttagtttcttgataaatatcgggatcatctttttttaaatctgcccgagcatcttgatatgtagcaacagcttctacatcatgatttaataatgcaattaatccctgatcatgacctttcacttgttgaatttgaatatcagacttttttattcctttttccattaatgttgctaaaggataaatatatcctgacgttgattccacatcttgcaatgctatcttcttatctttcaaatcttttaaatgattaatattactatctttacgaaccacaatttgagatcgatagtaatctacaaggtgatgtgtttgattccctttattatctactaggtaaccttttgactttaacaatacatctgctgcatgagcatcatgagctaatgtgtaagaaacaggagaaataaaagcaatatcgatttttttcgatttcaacccttctaccattgtattataatttgtggctatatgtacttttacaggaacctctagctcatcagataataattgttgcaaaggttttactttagcgttaagaatttgagcattttgagatgggacaaactcaacagttaatgacttaggtgtatatgtttctttaggaggctttacattgtcaatgtttgaacaaccgcttactataattgtaataattaaataaataactaaaaattttaaacgtttcatcattttctcttttcaaaatatataatgtatttaaacttcatcaaacttaaaatataaagacgtatttataatatattaaccaccaatatttaaattgaaaatacaatttatattaaattttgatttcagtttgaagatcttaatatttagattttcatcagaaagccttcatataagttgaattggggttaccaagaggactatacaacttcaaaataaaatccgtcatacttttctatttcttaatcatacttcataaaaaaatgccgacaaagtatacacctttgtcgacatttcaaaacatttattaaactatttaattatattttaattagtataagccttttgtttcattacttgtatcaataaagatatttttaacttgttgatagtttttaattgcatctttataaacttcacggccgataccagattttttataaccaccaaatggcgcaccagctggaatttgattatacgtattaacccaaatacgtccagtacgaattgcttttgcaacatttaatgcacgaagtaagtttgtagtgaagacaccaccagctaaaccatattctgaatcattagcaatgttaattgcttcttcttcatcttcgaatttttcaacaacaacaacaggtccaaaaatctcttcttgtgctaatttatgactattatctgaaagttcaatgattgttggttcgaagaaatagcctttatctaaaccattatcagtaatacgatgtccacccgttaagatatttgctttgtcatcttcttctgctaatttaatataactttcaattttttcaatttgttctgggccagtttgtgcacccatttttgtatcttcagcgaatgggtcacctactttaatattttcgaacgcttcttttaattttggtaataatttatcatataaagatgattgtactaataagcgtgaaccggcactacatacctcaccttggttgaatagaatacctaattgaacgccttcaatgacttgatctaaatttgcatcatcaaagataatattagcacttttaccgccaagttctaatgtagtcggcacaatacgttcagcacctgctttagcaacaccatagcctacatcagttgaaccagtgaatgataatttatttacaccttcatgtttgaaaatcgcatcacctgattctgaacctttaccagtaatgacgttgactacacctttaggtaacacatcttgaagaattttagctaattcaattaagcttaatggtgtagaagatgatggttgaatcaccactgtattacctgctgctaatgctggacctaatttccaagatgcaagtaagattgggaagttccatgctactactgcacctactactcccacaggttcatttacaactaaactcatagtgttatgatctatttgattaaccgaaccttcatcagtcgttaatactcctgcaaaatatttaaattgttcagctacttgaggaacatcaattgttgaagtttcacgataaggtttaccattttgaagtgattcaactgttgctagatgttccttattttcttcaatacgacgactaatttctaataaataatctgcacgttctgctttagaaattttactccagctatcaaatgcatcatgtgctgattgcactgctttatcaacatctttttcatttgctttagcaactttagctaattcttcaccatttgctgggttagttaccgtaagtgtttctccgctttcacttggttggaattcgccatttataaataaatcatattgttcatctaaaaaatctctaacatttacttttgccatacgttttcatccctctttctttgtttataaataaatcataacgtaactctctataaagtaatgttaaattcacttcatcattgatacgttttgtatatttattatttaccctttttttacaaaactatgcttaatttaaccattcaattacatcttcttgtggttgacgtgttttaggttttgtaggattctcttttctgtaaccaaaagctaccataactgaaggtgcaaactgattactatcaatgattccttcatgttctaataactcagttacgccatctaaatcgaaaccttccattggacaggaatcaatattcattaatgcagctgctgtcatcatattacctaatgcaatgtaggtttgtttagacgcccaatccaaaatggttctagcgttgtcattaatatgaaaacgtgtttggaatccctgtactttatctttaaacattggaatggtgctctcttcatactgcttaatccctctaataaatgactgtacataatcagacgtctgtgttacattcttacgagctaaaattagtacaaaatgactggcagatttaagttgcttttgtgcaccagaactataaggtattaatttctcacgcagcgtttcgttttgaatcacaagaaatctccaaggctcaaggcctaacgaactaggagataatcgtcctgcttcaagaattgtattaaattcagaatcacttatcttttttgttgtatcgaattccttagtagcaaatctaaatttaaacgcatctataatggtattttgaatctgattgatagtcatccactcctctattaaaaatcttactcaaattataaaatacaaactattttagccaaaataattagctcaaaatgatttgtctaattctaagttgtaatatttcattttaaatgatattttatgtatataatttcacattatacaaaataaaaaatcctttttaattgatttgtgaactaattcacaatataatagggttgtaagttttgttagagataatatttaatgattttgtaccaaatctcttactttaactttagtcttacgtatttattaaattttaacttttttatacaaaatgaaatggggttattttaatgacaaaaattatgtttttcggaactcgtgattacgaaaaaaaagacgctttaaattggggtaaagaacacaatgtagaagttgttacttctgaagaaattttaagcgaagacacagtagatcaattagaaggtttcgatggcgtaactacaatgcaattcggtaaattatcagattctgtttatcctaaacttgaaaaatacggtattaaacaaatcgctcaacgtactgctggttttgatatgtatgatttagatcttgcaaaaaaacacaatattgtaatttctaacgtaccaagttattcacctgaaacaattgctgaatactcagtatcaatcgctttacaattagtacgtaaattccctgcaattgaaaaacgcgttcaagaacataatttcaaatgggctgcacctatcatgtctacacctgttaaaaacatgactgttgcaattatcggtacaggccgtattggtgctgcaactggtaaaatttatgctggttttggcgcaaaagtagtaggctatgatgcatatccaaacaactcattagatttcttagaatataaagattcagttgaagaagccattgccgatgctgatatcatttctttacatgtacctgctaacaaagaaagcttccacttattcaatgctgacatgtttagcaaagtgaaaaaaggcgctgtattagtaaatgccgctcgtggtgctgttattgatacaccagctttaattaatgctgtaaataatggtactttatacggtgctgccattgacacatatgaaaatgaagctgattacttcacatatgactggacaggtaaagaaattgaagataaaacgttacttgaattaattgaaaatgaaaacatcttagtgacacctcatattgctttcttctcagatgaagcagttagaaacttagttgaaggtggattaaatgctgcattatctgtaattaacacaggtaaatgtgacactcaattaaactaagatttaatatataaaaaggcctgggacaacttatgatgtcctaggccttttttatgtgttagtagtcgactactgaatgagacgacgaattattctgtctcactctttaatactttttcttctataatttgaagtaccccttgttcatcattacttggcgctataaattttgcaatatcaaataatgattgatcatggctatttgccataacataactatgctctgcaaattctagcatatctttatcattgttagcatcaccgaatgccattaattcagatggtgacatttcccatttttttaacaaacgttttaacgcttggccttttgtcatattaggcataataatatcaatactatcatggccacttgaaactagtttaatttcttctttaaactttgtttctaaatctgtatccaaagtggaatgtgtctcacgattaatatttaatgcaatcttcacatattcatcattaggtaaaggttgaaatgtatctatttcttctaattgacgataataaaaatgggcatcctttttaaaggcttctgacgtatcttttaaaatatatgcacttttaagtccacatacaatgaattcgtcgatatgttgatcaagatgaatataattcactactttttcatatatggtttgatcaaaactacggtaattatacaattgattaccatgataaatcactgcaccattctcagaaatgaagtacatgtctcgctctccaaaaatagactttaacttagcatattgattaccactggctgcaataaattcaatatgtcttcgttttaattcttgataaattatctcaaagcgcgctttgtcatattctttatttgtatctaaaaatgtcccatccatatctactgcaatggctctaatcatgagtggtttcccccttacaatacttttcatcgtccattatatccaccttacgattgggattgaagtcagtacttaaagagtgaaactatattcacatttagaaattacatacaaagaataaaattttatgcataaaaaccgctcatcaatgagaagatgaacggtcaactaaaatatttatttaatttgtttagctacgaaaatttttcttttttcccaaacacctgtttgttgattataattatcacacgttattaatgtcagttgattagtttcccctttatgttcgtccaatacttgaacatcttcaggatctacatctcgaatgcttgtcattttatattctcgagtttcatctccaactttaaaataaactttgctgcctttttttgctgcttttaaatttgtaaattggtaatgtggacgatcagtaaacgtatgtcctgcaatagaaatattttgatcatcaagtgattcatcaccttctgcaaaacttacacctctattaagttgttcaagtgtcgcaggacctggataaacaggttctttgatttccgcatcaggtatgctgatataccctgccattttcgatttatcttttggaatcgtaggtttttcttttgatgtattgcttttatcatttttatcatattgttctattttatcatcattatctttttcatgtaagtaattatcaatatatggtttcgcaaataaatatactgctactaatatcaaaatcacaccaataatggtcatgagtcgatttgtccaatttttcactaagtagtactcctttaattttaaaattcttaattcatagtatatcatttatttttctaaataaaatgttagattatatgacatatatttgatttaacttcatgcaagtgcttaaattaacaataaatactataagtaggtgcttatcatgattagaaaagcagaacgtaaagatttacctgatatattaaatatttataatgatgccatactgaatacaactgctgtatatacttataatccacaaagtcttgctgaacgagaagcatggttcgaaacaaaagtgcttgcaaacgaacctatatttatatttgaaatagataataaagttgctgggtttgccacgtatggtcaatttagaaattggcctgcctatttatattctattgagcattctatatatgtaaataaagattatcgtggaagaggcgtggcatcacatttactcgagcatttaattgatgatgctaaacaccgccagtatcgcactatagttgcaggcatagatgcatcaaatgaagcaagtattaaacttcatgaaaaattcaattttaaacatgctggtacgattgaaaacgtaggctataaatttgaacgttggcttgatttagctttctatcaatatgatttaaatacggataaataactcataaaaaaatcgagatcttgttattcacataactgtctcgacttttttgtttattcttcatctctaaggctatctattttttcatgttttctattttcaagcataaaacacacatagtaaaaaagaaatacaaacattatactcatggacattgattgaagtaaaagattctcccaagttccttcgatcgtccatacacgcgttaacgttgtattaatgatgaaggctaaaaataagagatataatctaagcatatcatcatccccttttgagttattttatatccaaaagtgaaatattgcaattacttttttgaaattttctgataatttaaggcgtaaaaaaaccactcttgaatatgttgtcattcaagaatggtttaggattttaaatgttatgaaaaactattgactgggtcttctgcattaccaaagattttttgtttaatggcttctcctgttggtgtacctgctaaaccacctagtccagtttctctaagttgtgcaggtaagtttcgccctactttgtccatcgcttcgatgacttcatcgactggaattctacttttcacaccagctaaagctaaatcagctgaaattaatgcatttcctgaaccaatggcattacgcatgacgcatggaatttcaacaagtccagccactgggtcacacacaaggcctaataagttactaatagctaatgccatcgcatgacctgaagcttctggttcaccaccaaagacagatactgcagctgctgctgccatagctgatgctgaacctacctctgcttgacaacctcccgttgctccagcaacactcgcattatttgcaaccacacgtccaaataatgatgcaacaaatagaaaatcaatcatttgatcttctgttaaaccatgtgttttttctaatttaaataatacgcccggaatcgtaccggaggaaccagctgtcggtgttgcacaaataatccccattgctgcattgacttcatttgttgctacagcgcctttaactgcttccatcatttcatggcctgataaagcatgataattctcgttgtaatcacggattttagctgcatcatgtcccgtataacctgtgacactttctaccccatctcctgtagtccctttaactacagcatcacgcatgacttgtaaattttctttcattaaatctctaacttcatcacgtgattgacctgataattccatttcttcttgaatcataatatccgcgaatgacatattgttttcaacagcataatctatagtttctctaattgaatcgaacatttttaatcctcctttattttatataggatatatttaagtgattatatttttctttgatttgatttaatgttgattctttgattgcttttgttaacggtaaaacaactaaactattatcatcatctgtttcaaccaattcttcgtctatacttacgccaagttcgtttacttcatttaagaaatgattcacttccgacttatttttagatccatccatgactaaaataggtaagccatgattaaagttaacatctataccttcaacactaattcttctcaatttaatggtaccgccacctatagaattaccaatcacttcaatatgacgtccatttgcttcagcaattaaataagcacaatttggatgttctccaatactttctccatcttcttcaataatgtcaacatgaatacctaaatcgttagcaatagttaatgaatctttaattcgattatcgaacgtactataacccattgcaccacctacaattgctaaatctgtaccatgcccttggtgtgtttttgcgaatgattcataataatgaattgctaatgtttctggtttaatgcctccgagtacattaaaagcagcattccctatttttactgctccagctgtatgagaacttgaaggtcccatcatgactggtccaataatatcaaacgcactttgatagtcataactttttttagtagccattcttaaacactctccttaggttgtttttgtttagatggtaatttgatagataaattcatgagattgaattttttaatcaatgtactgatcacgaacgccaaaatgatacttgaaattgctacagcaatgattgtaattactgctttcataggtgtattaaagccaaacaatacaattgcaccagcaattggtgtagccataccttttacatttattactagtccactaaatgttacaatacatgcatttactacaccaatcaaggcatttgttccatataattgtaatggatatttagcaattaaatcaatttgagtgagcggttcaacaaaaactgcaaatgctttagatggaccaccaatgtttaatctactaaacatcacgtagttaacaaatgaagcgcctgtacaagttaatgcaccgattgccattggtacacctgttaaacccaataagcttgtcagtaccattgaacttaatggtgtcatacctgtaactggaatgactaatccaagtatcactgctaaagcgtatggatgactgtctcctacagcagtaattgcaccaccaatttgttgcaatacagccattactcctgggctaatgactgttgctaagccaaatgcaacggctggagcaattaaaataactgcaattaagtctaaaccttctggtacttttttctcaataaatttaataccaaatgaaataatatacgctgcaataaatgctggtaataatttaaaatcatgtaatactaaaccaacgataactgcaaatactggtgaaatacctaaattaacacatgtcaaaattcctactgcaacgccagctaaactccctgctaaatctccaatcacttggaagaagtgaatatggaaaacgccacctatcgcataacttaagaatgcctgtggcaagaaagttgcacacgctgctcccgacagtgcttgtaatccttgttttccatatggtgcaaagtttaagaaaagtgtcattacaattaatactaatacaagagtcccaacgcctaaaataatattcatttcccgacaacctctttctctctaatttcctagccaatgtcatagtacaccccttggaaaacgttttcaacacctaatacagtaaatctaaaatttatttgtgaaataattcacattttaagtattttaacgaatttaattttcatgtaaaaaaattagacgcaaaatattaattttgttcataaaaaaacagtagaaacgagaaatatactcacttctactgaaaaagatgtttataaatacactcagttataatacatcttttagtaatatgaatgttcaccacttgattgaattttatcaattatttattgttttcttactcactctatttcttaatggggtggatctcttatacacacaaacatacttaactatatcgttttactattctaaaacgttagaataagttgttatattttgcgtatcgatgagtgtatacatgatataaaataactcatgaaaattattgaaaaaaagttgaaaggatagaaatggcgtttctaaacatgcatacttattataaattgtacgaatgtatacatagtattctagtaataatcgtttaaataataaatttaggaaaagattcatagagggttttaaatcattggaatttaaataaagcgtctcaatcatatttacgtgtgatagttgatcaatgaaatgagtattgttcataactatcactcctttccatacttaacagataatgttatttggaatgaggaatttatatatattatttaatatctatattaggtttttgtcaatatatttattaaaaaatataatattttaattataataagggatattaatgggaatttactattaaaaagtagggacataaaaacgatatctgtccctactttgtcatctgattcttcgagtttctttctaaataatcatgtgctaaacactttaaacctttaataatgcttctgtaagttgatgtgtatgttgatagatttgtttataaatattgtaataagattcatattgttgatgtcgttgcaaatttggttcatatatatgttcaacgtctataaattgcgctacacagtcatcaaaagaatcaaaccattgtaacccatacgccgcaatcattgctgcccccatacttggtccttcttcatgctttaatttacgtatagatgcattaaaaatatcagcttgcatttgaagccaaaattcactttttgcccctccaccaattgaagtaatatgtgtaatttcttttcctgcttctcgcatcaattgaattgaatcatataaagaaaaggtaataccttctagtaccgctcgtgcaaagtctgatttagaatggttaccgctaatgccaatgaaacttcctcgaataaatgcatcgccatgtggtgtacgctcaccagctaggtaaggtgcaaataataaacgatttgcacctattgaagaggtactcgcttgtttaacaatttcatcaaacgtatcgttctcaaaaaatgttctctttaaccaattaagactatatcctgcagccagcgttactcccattgcataatatgtatttggaacactatgatcaaaaaaatgtatattatttttatagtgcgtttgattacttttttctacgtttacgattacaccagaagtaccaatactacataatgtatcattatcattgattatacctgcaccaattgcaccacaagcattatctccacccccagcaaatacttttaccgaagatgtaaaacccagttcactcactaagggttcttgaatagttccaacttcgtctgtggatttcacaagtgagggataaacatctcctatatcaaatgtatctccaacttcttttgaccaatcatgcgtttctggattaagaaggagcgtacttgcagcgtcagaatattccatgtgaatcttacctgttaaacgataacgtacataatctttaggaagaacgaacacatctactttcttccatagttcaggttcatgagtacttacccacatcatcttaggaagtgtaaaaccctcaagaatcggatttccatttaatcgctctccataaaccgatctaatttgcttacattgttctgaattacgtgtatcattccaaagaatagcatgtcgtacagggtgaccttctttatctaaagctactagcccatgcatttgccctgagaatgagatacccttcactttatataatttcatttcatcagaatgatttaactgatatatgcctgttttaactgcattaaaccattcctctggaacttgttcactatatccaggttgggattgtattaaatttaaaggcacacttgttgaagtaatcacatgacctgattgatttaccgcaataattttaactgcgctagttccaagatcaatacctaatactgcttctttcatacgactcaccctttatatcactattcatataattatattaatgacaatttattatttttatattttctattatatataaattaaatttagctatctatgtatttatgatagcgttttaaataattatttcaatacttattttaagtaaataaaaaaaggacaaaaaccgattgatttttgtccctttttattatctgtttcctacatcttgtccaacttccactgttctatcttgcttgttataaaccgcaccttgaacactaccaaagttaggatcgttacgtttttcttctacaccaaaacctagacttttgaaaatattgacatcattatcatccatagcattttcatagaagattgttccaccatcattataaaaacgtggcttattaatagattcttgtaacgtcccatttcctcttaaataatctacaatgacttcattaagaatcgttggaattttatttcctccaggcgaaccaatacccatatagaagtcgggtccaacaataatagtaggtgacgtataagaacgtggtgctttatgtttctcaccatagtttggactgtttggatctgttgaaaagtttgttagcgagttgttcatgtaaaaaccttctttaacatatttacctgttccaaagaagcttgataatgtatttgtagtacttgctaacttaccgttcttatcaatcactacaaagtgtgttgtacttgtattatcaatacgttgtgtattgaagtcactaccttgttcatcaaaattgataccgttaatcttatctagtaaataatcttgagataagtaggtattgctactagattctttaccgttaacaatatctctatttcgatacataatatcacgagatttgacaatccctgtaatataatctgtacgatcatttgcagaatttacgctttcatcaatcttcagaccttgttccattaagattccacctaatgggttagatgcagcataaacagtattgtttaaatattttgtactaataggtttcttttcttctgtttttacttgtttaaaatcctcttcagtgagttgattttttaattgtttagataaactttttccaatatgattataaaaataatccggtcctttatctcgaattttctttaaagtatttgctaaagcaggttgttttacaattgcaccttcacgaactgtacgcttgcctttaaagaagggagagtttcgatcaatgtcagaaccaaataatttcaagctacgttctaactctgaatctacttcaaagccatcttcagctaatggaatgacatagtttaagatttttttctcatccattttaccttctttttcatgcatatcatgtaaaccgcgtacaaaaccaggtgtccctattttatctccctttttgtaattaaatgaagatgttgttttatattcatacatgcgaggttcttcaccatttttaccatcgtaggtaagtgtagcgccgccaccacctaatccagatgaatgaggttctgttactgcaagcgcgtatgcgacaccttccgctgcgtcaactgcattaccaccatcttcaataattttattacctacacgtgttgcgatcgcattgtttgaagcgacaccatacgttttttgctcatcagaggttgctgatttacggttagcaatcttgttttcatatagatcatctttatcaagtttatcttctttattaaaaaaataaaatataaatgagattaaaattgtaatcactaaaatgactgatagtgtcactttattatagatattcatactacttggcccctttagataaatattgctccgtggctttatttaattcatttttttcgtaattatcgagaccttcatttgctctagcaaatgtaaccattaataaaatagcaataataatgagtgttgtaacaataggtaaccaatgttgtttaatattcaaaagaataccccccattcttttctttcagatgaattgttttatctttaatattattgtaataacgttgtgactccatactattcatatgatcttttgttaattttccatctgcagagcgaacaggtgtaatttgaaattgatgatgctgaccatcccaatcatgttgaaccactatacttttttgattttttgatagaaaatcagcagaggttaaatttcctaaactataaaaaatactagcatgtttatatttctcaatactttgtataactgtattatggccaatgattacatctgcacctgcatcaactaatgcatgggcataagctttttggcgatctgttacattacgttcgttaggaatcccccaatctacgttcacaactacaagatcattgttttcctttaagtttttaattaatggtacaaaaattttgggatctaagctaatagatgtcgtattttttaaaggatcttcataatacgattcaatatctgtgaacgaaacattagcgacttttttatttttaactttttgttgcactgttttactattaattggattcgaaccatttccagttaaaaaattataatctgtttgtgcttcaacttttttggataaatcttgcgcttgtacattatctatagtgctattaattaaattgatacttttaatattttgtttttttaaaaacataatgttttctatgtttttgtttatattttctttaggatttttagaaaattggttcacatataaagaagctgtggaaaaatcactttgttgtaatggctgtcttaaacttttaaaaacatcatttaaattgacttttctgatgtcattattcaaagtgatatttcctaaatatgtatttctaatactattacctgaatgtggcatcgcctctacaggttcaactttaacagctcgaatagcaaaaattagaagtactactgtgataactaagacaataaacgtatacaaaaagtttcttcgtttatgtcgtttcgattgcttaagtaaccattcgctcgctgataatcgttttttctttttcattattatgcgctcctcgctcgcgattaattaataaagctatataagaacaagatgacataagtaatacatgttaataacattgtcgtagctaatgtaattacaacaccttgtttttgaatggtattggcaataataccaggaataacaactccgatacctgaaacctctacaacttcaaatggagtgagtggataaattaaatcaaaaacaaattttagaaccataccagttaaaatcatcgctgcaaatttacgtctaccataaagaatgacccatctactaataccaaacgtaacaataaaataagtgagacaactaatgaccaacacagatagtaacataatgggttgatcaaaaataagtgctaaataaccaggtacaacaagacctgcgggattaatcccaaatttttctgcaaaaattaaacttaatacaataccaacaaatagggaaaagtataattccgaacctatcattttattctatcccttctataaattttgctatttttccacctggaccatgaatatttccaacacaaaatatgagtgcctgatgtgattcactaagaatcgctttttctatatctgaaaaatcatgattttcaaggtttatgtatgttttttcaggtagatgttgcattaaatctgtaaccatttgcgtgctttttcctgtacaaattaaggtatcgaattcgacgtcctcaataaaattctcaacgaactgtcgcgttcgatccaccctgtcagaacgacagttaagaatcactactttttttgtataaggataatcgtatgattctactttatttaatatcgctttcgtagactgaggctcattagcagcaaacgcattaacaaatacattttttgtgttatttgcattaaaatatttaatttcaaccgctcctggatcaggaggtgcatttaacatgccgcgcagtgcaacgtctttttcaactcctacagcttgcgctacacctaaagcgatagcgacattatcaggaaatactaaataattaaatttccttaagtatgattcaggtatatcatttttatctacaacaataagttcagttttacgttttttagcttccttagcaaaaaagtctgtaaactcatccttcatgactactaattttccattttggggaatcgttgcagtaaatgcttgagcaatatcttgaagtgtcggccctaatacgtccatatggtcttccataacattgacaatgacaccaatattcgcttttactaaatcttcttgaaagacaatttgataatctggattcactgccatacattcattaacaagcgcattgcctttttgcttaactactttttgcacaatgtctctttgttctcctatgttggcgccttgcggttttctaaggacaggatattctttctctgtaaaccaatacaacattctggcatcagtgcctgttgttttaccaatgacatgatattgatcttctcgcaaaatactataaatcattcttgtaatagttgatttaccacgaataccattaatatttattcgtagaggaatcttatttaaacggtgtgtatgtcgctttttctctctaattcctagaaataatatcaaagcgatacaaatgataatgagaatcaaactgaagtccctctctttaaacatattttttctttcatttaatattatcttaatgaatgcgttaaacactttaataagggtatgctatcatcttaatatttagtcagttttaaaaatgtaaatattcagttaaaaatagtataaaattataaaaaagttaatagaatatcaatattttctcgaataaattattgattatttcaaattaatatcgacaaatttaattaccttacatttattaatagtaaatcgataaatatttacttcttatttacatttacttaaaactctcatgttagtttataagtaaacattgctatgactctaggaggacataaatggataaatctatggctaaacctgttaaaattgcagttggcatttatctttctttagttttactggcttgttctagttatctcatctttattttgattggcagtctacaaggaaatgacatgagtaattctgtattagatactgatcatcgttatatcaacaacagttctcaatcttctcacgagacaatcaataaaaacaaatcaccacattcgacttcaaattttactgaaatagaaaaagaagatgccctatcttcacataacgatactattaatactgaatataaagaaacagatactaactctagagaataatacaagttagtatctgtttttatgtttatataaaatgcgaattaatatgttacttactgctagactattaataagtgacatgtttttattgaattttgctgaaattttacaacctaaacattcgattttcaatgcatttcaaattcttagaatgatattcattttactcattattttattattatctttttaaaaaaacagcctagtcatatgtgctatcatagatgttttattctttattcgagtgcttttaaaaataacaccaatgttcaaactagtatttaatcttttcccattatatttttcagttgtgtaaagaacttttgacgttctggtaatgggaaaataggataaatatggaataagttataaccaggtgtaaaatcatgttcaattcctttatcatttaacattttagagagctttaatgcatctggatataacgtttcttttgtgcctataaaaatagatatacgaccaagaccctctaaatctccgttaattggcgatattttatagtcttctattggcgtatcaccagaccataattgaatgaaatatttacttccttcaattcctagcataggatctactttttcatattttttagcttcaggattactaaatgttgcatcaagaactggagacagcatcacaatatgtcctggttgtggtaattgtgtttcttttttaagatattgtgcaaatgataaagcgatttgaccgcctgctgaatctcccattatcgtcatatgttgcggattttcaacttccaatatttctttttgataaatattttttagtaattcaaatgttgttcgatagtctctgtgaggtactttaggataaacaggcataatcactcgtgcatccaattctcctgcaagttgatcaataaaatcaaaatgattatctaatggatcttggaaccaagcaccaccatgaatgtaaagcacaacatcttgatgaggttctcttttatcattaacaatatatgtgacagatccattaatacttctagtatgcgcacgatgtttaaattcataatccgtcccatcatatttaccagctgttaaaggtttaacttcctctaatgcttttttagcatcattcgtattttcaaatgtttttttcattccagacatacgaatatatttttcagtaataaagctttgataactgcgtttttcttttactttaatgtaagctaaagttccaagaattgcagatgtcgctacggttaataatcgttttttcatcttttgacctcctatactctatattattatatacctcagagtcgttatattttagtaaatcgcttattcaacttttaaatatttaaaaaagtagtgataagtgctattctaaatataattatcagaatttttattctattttagaaagtaggttatgctgaatgaaaagaaataaaattgtgctgattggtagtggattcgtaggttctgcgtttgcacatgcagttgtagctaaaggactagtcgatgaactagctattattgatattgatgaagataaagcaaaagcagatgtatgggatttaaatcatgctacaccttttggtgataagtttgtagatgtacatcttggttcgtatagtgattgtagtgatgctgatatcgtcgtgatctgtgcaagtgcaaaattagataaaggtgacacacgtttaaaattattagaagataatgtgaatatctttgtgcctatgattcaaaaagtcattgctcatggtttcgatggttattttgtacttccatctaatccagtcgatattatgagttatgttataaaacgtgtgtctcaatttcctaagaataaaattattggatcaggaacttcattagatacagctcgcttcgaatttttcttaagtcgcacgtttgatgtggcaccacaaaatgtctatgcgcctgttattggcgaacacggcgattctcaagtagctgtttggtctcatgctcaaattgccggtgaacctgtccttgatttactgaataaaggagtagaccaaaccacgttcaaacaatctatcgcttcgcaaaccactcaagtgggatatgatatttacgttcgaaaaggtactacaaactttggtatatcattaagtttagtacgtattgtagaagctattttatttaataaaaatgtgattatgaatgtttcaagttatcttgaaggtgaatatggactaaatgacctttatattggaacgccaacagtgattaacggtaatggtgctgatcgtgtcattgaactgaaattggaagaagatgaacttactcgtttcaaacaatcaagtcatattattttagagcatcaacaacgtgctgatgctctcattgaatcaattttaaataaatagtaataaaagagcctaaacacaacaattcatttatcgtgtttaggctttcttaacttattttaaactctcatgcattaaacttaattggtgctcaaaatcttgcatatcaataaaacgcgcttgtcgatgcatttcttttccgtccaaaaatattaaatccactggaacagtaaatatagatagttctcccgcaatagcttctacattagattgattgataacagcaaaatggactttagaataatcattgacgatatcttcaatttgtggcaataccgcatgacatactgaacaatgattccgcataacatgaatcactactaatcgatgcgtttgaataaattgatgaaattgttcaatactttcaatatttttagtcatattttcacctacttatttaatttaacggtctcgttctcttatacatacttattttacgatgttacacttattttttcatctaaatcctcttgttaaatacgttcaacaatagttcaatgattttctcttcaaaatagaatacatcttattaaattaatgttataatgtttgtgaaataattcacaatttatattggaggaatcaacatgaaagcttacatctatgaaaaacctggcgtagctaagctcgtcgataaagaaaaaccagttgttacggaaagtactgacgctattattagaatggtcaaaacaacaatttgtggtactgacttacatattattaaaggggacacacctgaagttcctcaatatacgacattaggtcacgaaggtattggtattgttgaatctgttggttcgaatgtcaataacttcaaagtcggcgataaagtcattgtgtcttgtatctcatcttgtggcaaatgttattactgtaaaaaaggtatctatgctcattgtgaaaatggcggtggatggatattaggtcatcttgttgatggtacgcaagcagaatatgtgaaagtcccttttgcagataattctttatatcatgctcctacttctttacctgatgaagcactcgtgatgctttcagatattttaccgactggttatgaaattggtgtattaaaaggaaaagtaaaacctggtagcactgttgctattgtaggtgctggaccagttggattagcttctttattaactgctcaattctactcaccttcaaaaataattatgattgatttagatgatcatcgtttagctacagccaaaaaatttggagcgactcatacaattaattctagtaatgtgaatgaagcaattaaacaaatcaaagatatcaatcatcgtggcgtcgatgttgctattgaagcagttggtattccagcaacatttgatttatgtcaaaagttgattggcgtcgatggaacaattgctaatgttggtgttcacggcttacccgttcaatttgatatcgaaaaattatggattaaaaatatcaacgttacaactggtttagtttctgctaataccactgaagaattgttggaagcactcaaatctaaaatcattcaacctgaacaactcgtgacacattatagtaaattaagcgaaattgaaaatgcttatgacttatttagaaatgctacagatcataaagcaatcaaattattaattgagaatgatataactaaataatgttgtgtattaaataaaaaataaaagagaaagatttctttttgaattcgtcgccctactatagcaaagagaactagcattgaaaaccttaagacaacaccttttcaattcagtcatcgaccgccaatacattaaaaatgcctgagacacatatgatgtcccaggcttgttttattatttaattgtcataatacgcttaccaggatctactgaatcaacatcatcgaatgttaatgttttatcatcttgatttgtaataatcactggtgtgacaacacttggcgcatgttcttttaagtatgctaaattaatcttcattaatggttgaccttgtgtaacaggttcattgacatcaactaaactttcgaagccttcaccattcaatttcactgtatcgataccaatatgaattaatacttcaattcctgtatcagattctaaaccgatggcatgtttcgttgggaaaatcgttttaactgtaccatcaaatggtgctacaatttcgcctttttcaggaacaaatccaataccgtcacccatcattttttctgagaatactttatctggtacttcagataatgggatgatatgacccgtacctggtgcatagatatcagtttcttttacctcttccaactgtactggctcatctgatgtatcttcagtcacagtggtttcactaggttttgtgatatctccattcataatgcgtgccatatcatgtttaatttgatctgatttaggaccaaaaatcgcttgcatattatttcctacttcaagcacccctgaagcaccaagggcttttagtccttcaacgtctactttagatttatcattgacttcaacacgtaaacgcgtaatacaagcatctaaatgcttgatattttctttaccgcccattgcatctaacacatcaaaaggtaatttacttgcagatgtattagctacagaggcttgtttatcttcacgacctggcgttttaaagttgaatttaacaattaagaatctaaatacaacataataaataacagcgtaaactaatcctactggaatcactaaccaccatggtgttttatttggaagaatacctaataaaacaaaatctatgaatcctccagagaatgtatatcctagatgtaaatgtagtagataaagtgttaaaaatgataatccatcaagtactgcatgaataaagaataataatggtgctacgaataagaatgaaaattctaacggttcagtaataccagttaagaatgatgttaaagctgctgataacatcaaacctccaactacctttttattctcaggtttagctgtttgataaattgctaatgctgctgctggtaatccaaacatcataacaggaaattcaccttgcatgaatttacctgaagttaaatgaacaccttcacgtatttgctcaataaaaatacgttgatctcctcgaataatttctccagctgcatttttccaagaaccaaattcaaaccagaatggcgcatggaaaatatgatgtaaaccaaatggaataagtaatcgtttaataaatccaaataagaatactgccaatccagtattagattctaacaaacctgtactaaatgcatttaatccattttgaatgaatggccaaatccaagccattgggaaagctaaaataaacgatgtcgttgccatcataatcggcacaaaacgtttacccgcaaagaaccctaaatacgatggtaaggaaatattataaaatttgttataacaccaagctgctagagcccctataataatcccaccaaacactccagtttgaagtgtaggtatgcctaaaacatttgcgaatcctttagatgggtcttccaattgtgctggcgtaacatttaagaatgctcccattgttttattcataataataaatccgacaaaagctgcaatggctgctacaccatctccacctgctagtcctattgctacaccgagtgcaaaaatgataggtaagttatcaaaaataataccaccagcacctgtcatcatgttagcaatattttgaattactccatttttaataaatggaagataatgctgtaatgcttcaccttgaaaagctgttccaattgctagtaataatccagctgcaggcaaaattgccacaggtaacatcaatgctttaccaatacgttgcaattgtccaaatagctttttaaacattttgattcaatcctttcaatatatcttttttacgcattaaaaaagcatgaccaaataagcccatcatttatgacaaaaataatgatagcttatctgctcatgcctaatcgaatagtaacacgcagttcttttttaacaatttaattatacctataatataaagcgttttcaatatctttttttactaatattttacatttttttaatttaaatattcataaaaaaacactgacaaaagcattactttcgtcagtgtttcgaatctatgtcttataagaaacgtttagcagctacagagattggtggtactttatcgaagtcaaattctttgtcttctgtgatagatctgtaagcccatttaccataaccatatgcttcttcgttaacgatttgacctggtaatggcgcagcgtttggatcaacatgtacatcaacaacagttggtacattttcatttaatgctgcttcaacaatttcatcaatacggttagggtcttttaatacataacctttaccaccagcagcttcagcgaatttagcatgatccatatcagagaagtcgatggcatattctaattcaccagcagcttgttgttcatatttgatgaatgataattgtttgttatttaatacgaaaattgtcattggtaaatcgtattgaacagcagttgcgaagtcttgcattaccatttggaatgcaccgtcaccagtaattgcaattgcttgacgatctgggtaagcaatattagaagcaagggcacctggaagaccgcaacccattgtacctaaccatgctgagataataaatttattattaacatttaagtctaagtaacgtgtaccccaaacagttgaagtaccaacatcgattgagtatacagcgtcatctttactgtaatcattgatagctttcattaagcgttctggacgaattggagcacttgtattattcatgtctttttccatccatttatcccatacagctttacgttttaacgtcttgtctaagaatgaacgacgaggtactggtttgattgcttcagttaattgatggaatgctaatttaacgtcgccaacaataccaacattaatatcgaaacgttcaccgattacgtttggatttgtgtcgatttgaatcgctttaatatttttcttaggtaagtaatttgcataagggaagttagtaccagccataattaataaatcagcatcttgaatagtttggtaagacgtttttgtaccaattttacctaagttacccacactgtatggatgtgaatcaggtaaaacagttttagctggtaatgtatgaattacagggattttagctgcttcaatgaagtcttgtaattcagttgaagcattttttgcacctacaccaacaagcataactggttttttacttttgttaattaatttggcagcttttttaatgctacgataagatggtgttggtaacactggtctagacgtatctactggacgatgtgtagtgtctttaattttttgagttaataggtcatttggacaaataataactgctacaccatttttttcatatgcagtacgaatcgcttcgtttgtaatttcaaataagtcatcacctttttgaacttgatgatggaatactgctacgtcgtcaaccattttagaaatgttagtttcttggaagaattttgtacctaataatgtactattcgtttgacctgtaataataagttgaggtacacggtccattttagcgtcatacataccatttagtaagtgaacaaccccaggtccaccaatacttaaagctacaccgattttacctgttaactttgtatatgctgcagctgataagcttgcaacttcttcatgacgtacatgataaaatttgaaagtatctctaactgttcttaaattatctactactgcatcaactgagtcacctggaataccccataagtgatcaatatcccaagcttgtaatgctttaactaatgcttcatttgctttaatcttcgccattgattaaatagcccctttcctaaatatacaatttgtttctgtattccctttagtaaaacaacttaatcataattggaataagaattgaactaataactgctgttaaaatcattccaattgagctaaatgcgccagattcgatgtcgtgttctaacgcttttgcagttccaaaagcatgtgatgcatttccatatgttaaacctctcgcgattgatgttttaaattgaccaaccttaagtagcattgaacccatcatactacctatcaatccagtagtaatgataaacagtactgtaatcgtatctgtacctccaagttcttgagagacttcaattcctacagcagctgtaattgatctaggtagtatagttacgattgtttcttctgagtaacctaataactttaacgaactaaacactaacacaaaattcaatatcacgccagccatgacgcttgaaaaaatgaccccaatattttctacaatcttatctttatttttataaagtggataagcaagacatacaacagtggcatttaatagatggttaatccattgaccgccaatcatgtaatcgtgatagttttgacgtgttaaaagtaaaacaataattattccaagtgaaccgattaatgctggattcaataatgggttattatatttacgttgtaatatttgagcaagtttatacattacaacagttaataatatcattaaaacgccttttaatatatccatttttaatgatttcctttcttagtatgaggttttttcttagacattgtttcagcaataaatccagaaacaagtgccacacagcttgtaccaataataatcaagaggaagaaaataatataacttgtagtgatattagaaacaatatccataattcctacaactgaaggaataaagaagaagaccattgtggttaataagaagtcggctcctttagaaacccattcaacgcgaataatttgaaaatgtaataaaatataaaataatatcataccgataatacttcctgctaatggtatatgtagccatttttgtagtagtgaacctataatactaatcgctaccaccaatacgatttgaagaataatctctataatatttaatgcttttttcaaaacgactgacctccataaatttgtcgaatttgttacagcgattttttagtctatattcaaaattgtaatctatattgacagattataaaaatattgattttatatataacttatagttattttctatggaaccgttttaaaaataaaaaatagtgagagaacctacgttaaggtttttcactatttataaaaatgaaccgtttacttgttttccaatctctcagtcataaattttatccatttagacgttgcataacttaaaagtttatcttttttccaaattgctccaagttcccagctcatacctgagtcttcaatttttatacttttaatctcatcttttaacatcttggcaatatgttctggtaaaatactaacgcctaatcgtgctattactaaatattcaatgaaattccattgtgatacattggacactgtatttgggataaaaccagcattttttgcagcagctataattttatcattaagataaaagtcctcattgaataatataaaatcttcatttttcaagtcagccatagtcacagatgagcgcttagctaactggtgttcttcactcactataagtcttaaatcttcactatataaagacacataatcaaatgtgttctcatctataggaatggtcgtaataccaatgtctatttgattgttaaccaaacgattttcaatcgatttacccccactttcattaagactataggtaacgtttggatataatttatgaaactccgctaaaatattaataaattgttgcatatccatcactgctgacattccaatattaatatggcctgtttctaaaccaagcaagccattaatttcatttggaatattatcatataatgctaaaatctcttcacattttttataaaacacttttcctgcatctgtaagaactaaataacgcttttgtcgatcgaataaaggcatgtctaattcattttcaatatcttttattgctttacttatagttggttgagcaatatataaagatttagaagcattcgtcataccaccttgattcacaacttccataaaatatttcatatgcttgatatccaattgctcaccttcttaaaaaattctttttttattatacattatttttgtaagaaaaatgtaaattcattagattttgaattcattcgataacttactcaaatatgtatactttatggaaaaataatatttataaataaattatttttcatataaacaaaactatattttcaaattacaaaaaatgttataatcaaaatcggctcaaacgaatatgaggtgatgaattgagcttttacgaatttatgcaaaattttataggcgatgacacaccattaggtgaattggtaaattggattaatcaagataacacttttcctaaagacgtgaagagccaaaacgaaatattgctatattttcgaacaaatccgtgtcttgaaaacataccggtgactagtgttaaaagagcattagctgtttttaaccaattcacagatgtatgatttcaacaaaatgtagttatacattacatggaagtatcatctcactaaggcgccctcggggcgtcttttttatgcacaaatttagctacaatatattacgtatatttcagaagtattacagttatttgtataattcattccttatattgtattacaactttttaaataatattattattttagattttaaattatttaatttttgaggagaacttaatgaaaattaaaacattcattttacgtctaatattagctacgacaattatttttactggcacttatacatatcaaaatgttgaacatacacatacttctaaagcagctggttataactattataataaatatcaatgtacttggtgggcatataaacgccgtgttcaattaggtaaacctgtttcaaatcaatggggcaatgcaaaaaactggtactatagagctcaacatgctggttatagaacaggacataagcctaaacgctatgctattatgcaatcaactgcaggatattacggtcatgttgccatcgttgaacgtgtttacagtaatggaaagattcttgtttcagaatataattataaccgtccactagcatacagtacgcgttatattagtgcatctgctgcgcgtaattacaattacatttattaattgacacaacataataagccatgaaagtttagtgatggaatctcttccatttctaaattctcatggcttatttttaagattggcgtattgattttaaaatgcgttcagccgcttcagtattcgctttaggttcttgtttgagttgctcagcaacttttgaaatttcttcacttttagcgcctacaacaatcgctaatgatttatattgcaaactcatatgtcctttttgaataccttctgaaacaagggctctacaagctgaaaagttctgtgctaaacctactgcagctactacatgtcctaattctctagcagactcaacgttgagtaagtctaaagacgctttcgcaactggtaatactttcgttcctccgccaacaatggctaaagtcatcggtacttcaattgtgcccacaagacgtcctcgggcttcatcatatttccacgtagcaatacctctatactgaccatcgcgtgctgcataagcatgcgcacttgcttcagcacctcgtgtatcattacctgtagctagaacaacggcatgaattccattcatgactcctttgttatgtgttgctgcccgatgaatatcgacttgtgcaagcactgacgcacgttccattctcttagctacttcttcaccagaataatcgccgcgatttaaatcattgatatcaatctcaccttctacccttacaacagaagacgttgcatgattagataagatactcattaatatctcttgatctgttaactcattttttagataggctgtcactgcttctaaaatggtattaagcatatttgcacccatcgcctctttagtatcaacaaatactttaagagacaataactgttcattaggaaatgcatctatgtcaataccacgataaccacctccacgatggatgatagaaggataggcttcatctgcaatacgtttaatttggttttcttgtttttgaatacgttgtgttaagtcttctgtatctttaacatcatcaaatacgatttgtccgatcatcaagcgttcactttttatcgttttaaatcctccagtttggttaacaagtttcgatccataactcgcagcagcaacaactgatggctcttcaaccatcataggtaccacatattctttctcatctacaataattttaggtaataatccaactggtaatgtgccttggccaatgacattttcgatgagactgtttgccacttcctcatcaataactggattgcttaataatgtttgataattcgttttatctaaccacccgtagtctactaattgttttaatttatcttctcttgataaatgacgaaagtttttatctaaacttttcatattaatgtactcccttttcaatcattaaagcaatacctagtcctccgccaatacaagctgttgcgatacctgtatgttgatgttcttgttctaaagcattcacaagtgttgtaacaagacgtgcaccacttgcaccaataggatgtcctagcgcaatggcaccaccataaatatttaaaatgttatcaggtatttttaaatgatccttaacaggtatactttgagctgcaaatgcttcagtcatttctataatatcaatatcattaatgtgttgatgtgttttttctaataatttttctactgcataaaaaggtgcataccccatgtattgtggatcgcaacctacttcagcgtaatcgcctactatgccaagaatttcaaatccatgttcttttgcaaatgttgcttccattaaaataagggcagatgatccatcattaatacttgaagcattaccaccggtgactgttccattctctttaaatattgttttcaaagtagataatttttcgacactactatttggtcttataccttcatcagaagtcatctcattaccttcagcgtctgtcatttttataatttcattatcaaatttaccttcttcaactgcctttgcagctttagcatgagaatggttagcaaactcgtcttgcatttcacgtgttacatgatatttttcggctatattttctgctgtgacacccattggaacataatggaaagcatccgttaatccatcatgcataaaactttctacaggatcttctccgtcttttaaaataagtttaggtgcattagtcatactttcaacaccaccaacagcaacgactttagcttcccctaactgaataagttgcttccctaaaataattgctttcagtcctgaaccacatacttcattaatcgtcatcgctggagttgtatcaggaatacctgatttaatagcaatttgtcgtgcagaattttgtcctataccactttgtaagacatttccgaaaataacttgttcaataagagctggatcgatatcaattgattcaatagctccttttaaagctgttgtacctagttcaacagctgaataatttctcaatttccctttatatttgccaattggtgttcttttagcacttacaatagcgatttgtttcattctttatctccttgcctgtaatatagatataattgtattttagtaatttattttggtaaaatacagagtattgtattgttaaaattagactattcgaaaggatgacatgcctgtgaatataggtatcgataaaatcaatttttatgtccctaaatactatgtagacatggcgaagcttgcagaagctcgtcaagttgatccaaacaaatttttaattgggattggacaaacacaaatggcagtaagtccagtatctcaagatattgtatcaatgggagccaatgctgctaaagatattataacagaagatgataaaaaacatattggaatggttatcgttgctactgaatctgctatcgacaacgctaaagccgcagcagttcaaattcaccatttattaaatatccaaccttttgcacgttgttttgaaatgaaagaagcttgctatgcagctacacctgcaattcaacttgctaaagattatcttgcaaaccgtcctaacgaaaaagtattggtcattgcaagtgatacagcacgttatggtatcgagtcaggcggtgaacctacacaaggtgctggtgcagtggcaatgttaatttcacatcagcctcgcattttacaattaaacaatgatgctgttgcttatacagcagatgtgtatgatttctggagaccgactggttataaatatccacttgttgcaggcgcattatcaaaagatgcatatattgaatcattccaagaaagttggaaagagtatgcacgtcgtgaagataaatcattatccgattttgaatcattatgtttccatgtgccttttactaaaatgggcaaaaaagcattagattctatcattaatgatactgatgaaacgactcaatctcgattaacgtctggttatgaagatgctgtatactataatcgctatgtaggtaatatatatactggatcactttatttaagcttaatttcattacttgaaaacagaactttaactcccggtcaaacaattggattatttagttatggttctgggtctgtgggagaattctttagcgccacagtagtggaaggttttgaacaacacttagataaaaaagcacatcaaactttattaaatgagcgtcaagaagtatctgtaaaagaatacgagtcgttcttcagacgttttgatgatttatctttcgatcatgagattgaaaacgtagaaaacgataaacatatcttttatttagaaaagattgaagatgatattagatattatcattctcctgaataatgtatatcactcagatattaaaaaaggtgggacgacgaactcaaaatgaattcgtcatccaatctccccaacacattataaacgcctaagataacgaattatgtcttaggcgccttttatttatggtttagttgtgtataatggtcgatataattgactcatattcacattttcaatttctaacaatttaattttattatcaattgttccaccatatcctgttaaactaccatcttttcctacaacgcgatgacaaggaataataatagaaattggattttttcctaccgctccacctacagcttgtgcagacatttttggtttgtttaataattgaccgatatgtttggcaatcgttccgtaagtagtaagctctccatatggaatcgtattaagataagcccatacttcttgttgaaaaggtgtaccatgaggttgtaaaggaaaatcaatctctggattatttcctaagaaatagtcatcaagccatcgttttacttttttaaaaatatataattcatgatttgtaggaaaacgtaaatgtgtgtattgatataaatattctaattgcgtcactacttctccgtctgtaatgatttctaaattacctactggagattgataaagcattgaataagacatatagcttcctccttactctattgtattgtaataaaaaataagaagcgagactgaattcatttgaattcctcttctcgctcctattaatcaattctgacacatttattaataactttttaatactaagtttattttaataacacaataattcttaattgaagttatataattcataacctttatctttagcatattctaatgctaaaatttctaatatattgataaacgctggctcatctttcacatttacatattggaattttaatccataatcttcagctgtgattgatttaatatcgtcttcgcttacacctttttgttgagctaagccttttttaaattttgttgtgcctacaccagattttaagttatattgtcccattttattaaataagtctttcgtaataggttgataacctgttgaatatcctccagtttgacctacaaatattggtgtttttttatcaaaaataacatatacaccaaatttatcttgaactttttcacgatcttgtttactaaatgataaagcattatttttgtcatacttaaataattttttaagttgctttttattatcttctttaatttgatctaatcttttactacctttcatattataccatcctccagtatagagtatttttatcttttatcgaattaacattgaatcattctataaagaatactatttttctataattttttaatttttatttataattctaattaatttctttaaattttgtataccctattcatcctagttaaaacttttctatattgtaaattatttaatgctaaacataaaaaatcatttcttttattaaattataatttattagttattctctatttatttatagatatttctattctataatcatatattatgtatctctatataaatattttatagtttacatgttaggggagaaagacatgaatgataaagatttaagagtgataaagactaagaaagcgttaacgagtagtttatatgctttactagaaatagaacccttctcttctattacagttcataaaatttgtgaaaatgctggtattcatcgtactacattttataaacacttttatgataaatatgaactactcgtctatttacttgaagtcattggaaaaaattactttgcaattgatattaaggaacgtattaatcgtccgtttcaagttttgtctaattcattaaatcgtgaaacattgtctagaatcgaatacatgcaagaagaagataatgaatacaacaaagttagaaatcagtttcttatagatattatcaaaaatgatttttatgaaaatatggatcggatagcacttgaagaaaccattcctaaaagcttagttttctatgtttttggttcaattatagatggttttttagagtggcaaaaaaatgaggagacaacacttacacctaaagaaatggatgaaatttttcataaattagttaatattaaaacgattaattaatgatcaaacaatcgttatatcgttttagtaaataaaacccgtcgaattaattcaacgggttttatttattattaattattgttttttatatgatttaattttaattcatttaactcgctagatgcattaatatcacaactacaatctgtatcacaaccaccacattttccttgagtagagcgattaaagaatttatataatgtatacgcagcgtaaccaaaaatagcaacaaaaatgattacgtttattaataaagtcattgtcatcatccttatataaatagttttgttatttgataaaatgcaaatgttaatatatacgctgtaaaaattggataaattaatgctgtaagtgtccatttccatgatgttgtttctttacgaattgttgcaacagttgaaatacatggcacatataataatataaaaatcataaaggcataggcagataaaggtgtgaactgttgttgaatgacattcactaaaccaccttcactagaagaatacaggatagccatagaacttacaatgacttctttggctaagaatcctggaattaacgtagcgcctgcttgccaactaccaaatcctaatggagcaattagatgtccaaagaattctccaatactatgcatgaagctttcatcaatctgtacattcaccccatgaggaccgatgtaactcaatgcccaaatgactacagaaccaccaaaaataaatgtacctgcttttttaacaaatccttttgctttttcccaagtacttctccataacgttttaactgatggcactctatatgtaggtagttctacaataaatacggaattctcacttttaagaataaacttgttaagtaatgtacttacaattaatgccactacaattcctaatacatataaacttagcactacaagagattgatacttttcaaaaaatactcctacaaaaatagcatatactggcaatcgcgccgaacatgacatgaaaggtgcaattaaaatagtgatgagtctttctttttcattttcaatactccgtgttgccataatactaggtacattacaaccaaatccaataatcattggaataaatgatttaccacttaatcctattgattccattgttctatccattaaaactgcaattcgtgccatatatcctgaatcttctaaaagtgaaataaagaagaataatacaataatttgtggcacaaatactaagactgaacctactccagctacaataccatctgtaatcaaattctgtagaaatggcgcaacatgtatataatgcatgcctgcctttaaccagtctgtgagcggcccgctaaagaaagcatcgagctgatctgataatggtgttcctatccaagtaaaggtcgtttgaaaaatcagccacataatgactagaaatattggaatacctaagtatctattcattattattttatcgagtttttcagttaaaaattgctgttcttcattcggatattcaacgacaccatctaatagacgatcaatgtattgatttcgaattatttcaatatgttgtcgtattgatatatctaagtgttgacttaacttctctttaataggttcaatttgttcggaaatgactgaaggtagttctcgctcgatttccggattgtctaataaatactgaattgctataaagcgtaaacgttttgaaggatattctgtatgtgcttgaatgatagaagtcatttgcttaatcgcatcttcagtttctttaccataactgattttgaagttacgtttttcttttggatttaaaaaagacaattcatttagcaattcctccgtaccttttcctttacgagcaacaatgggaaatacaggtactttcagttttctcattagaccttcatatttaattttaatacctctttgcgttgccacatctaccatatttaatccaatgataataggttcatttaattccattaattgtattgtaagttgaaggtttctctttaattgactggcatcaataatgttaatcatacctgtaaatgtatttgtcatcagatagtctgtgacgattgtttcatctttagaaataggtgataaatcataaatacccggtaaatcgattaaattgccaatatctttctttaattgtccaactttcttttcaactgtaacgccactccagtttccaatgtattcatacgaaccggttagtgcattaaacaatgatgtctttcctacatttggattacctaatatacagaagctttcgtgcataggcttactcctctaacataattaaacgtgcatcacgttgacgaatgcttacacattggccattaatttcaacaacacttggtccatttaacaagcacttttgtttaatactgattttactacctacatttaagccaaaggcacctaaacgatatagcatatttttattttgaatatcaatttgtttaactacatactttttatcttttgatgcagtgcttacatttatcattccagtcacactttctatttgtaattaataatcattctcaacacttaaatgataacctttttcacttacttttacaatcatttatttattcatttttcataaattttatatacgattcatacattgtttagcgtatttattttcttatttagactataaaaaaagctatggaaaatcgaacgaattcgactttccacagcacctaccacttagttatgttagaacatctctgatacgactttttgttctaagaagtttaataaatagtcaggactgcctgttttagcgtctgtacctgacattttgaaaccaccaaatgggtggtaacctacaacagctgcagtacatccacgatttagatataagttacctacatcaaattcatttacagcttgaatccaatgttcacgattgtttgtgatgaccgctcctgttaagccataatctgtatcatttgcaatatcaatggcttcattaaagttatcgaatttggtgaagccaactacagggccaaagatttcttcttgcatcacttgatcagaagatgttaatcctgaaatgattgttggatggataaagtaacctgttgaatcatccacttctccaccaatttcaatttttccttctttactaccaatttcaatatattttttaattttatcgaattgttttttattaataacaggacccataaatgtattattgacagtattacctattgttaaatcttttgttaactcaattgctttttctaagacttcatcataaacagcgctatgcacaatggcacgtgaacatgctgaacacttttgaccggagaatccgaacgctgacgttacaatagagtgtgcagctaagtctgtatctacaccttcatctactacaatcgcgtctttaccacccatttcagcaatcacacgttttaagaaagtttgaccttcttgcacaactgcactacgctcgtaaatgcgtgttcctgttgcacgagaccctgtgaatgtcacaaaatgtgtatgcacagaatcaactaagtagtcaccaatgtctttaggagcaccaggcacaaagtttaccacacctttaggtaagcctgcttcttctaaaatttcaatcagtttatatgcagtaagcactgtgtcttcagcaggtttcaataacactgtattacctgcaaccactggtgctaatgttgtacctgccataattgcaaatgggaagttccagggtggaatggttacacctgtaccaatcggtttatagaaatattgattgtgttcaccttcacgatctaagaccggtttaccatctgcaagttccatcattgaacgagcataatattctataaagtcaataccttcagccgcatctccaactgcttcatcccaaggtttacccgcttcatacaccatgactgctgcaatttcttctttacgacgacgaattattgctgcgacacgaagcattaattcagcacgatctttgtgtgaccatttacgccatgcgtcataagctttgtttgaagattcaaatgcgttatctacatcgtcttttgtcgcttttgacactttagctactaattcagatgtattcgctggattaattgaatcgaatgtatcatctttaatgatatgttcaccatcaatgacaataggaagcgttttacctaaactatgttttactttttctaacgttttttgaaatctttcaacattttcttgtacagaaaaatcaataccaggttcatttttgaaaggtactaccatacttcattaccccctatatgtttttaagtatttaaattcattctctaaccctttgtttcttaatcatgatattttctatcattaacttcattttactatgcttactccttcatttgcaaccgcttacaaaattgtttgtttgaccttttattcaaatactaatgtagccctatcaatacactttattatataaataatttataatttaaataaaataaagtataataatcacaacacaatcaaccgacatctagaaaaggaagtatatatatgaaagcacttatcactggtggagcaggctttattggctcccatgtagcagaatattttatgaaacatgacacagaagtacatgttattgacaatttaagttccggttttttaaagaatataccttttgtgaacaatgaacatatttatattaaagacatcaccgattttgaatttgtaacacagttaatacaaaaagaacaatttgattttgtcattcatttagctgctatggtgagtgtagtagaaactatcgaaaagccagaattatccaatcgtattaatatagatgctactgtcaatatattagaagcaattcgaacatataatccaaatattaaaaaagtcatatttgcttcttctgcagctatttatggtcatctacccgatttacctaaatccgtagaacaatctaaaccatttccattatctccatatgctattcaaaagtacgctggagaacaatatgctaagatttataatcatttatatcaaattccttgtacttgtctaaggttctttaatatttacggtcctagacaaaatccaacatctgattattcaggagtcatttctattatgaatactaagtttttaaatcattcaacctttacattttatggagatggtgaacaaacacgtgattttgtttatatcgatgatttaatcaatgctatatcaattgttcttaatactactctaacggatggttttatctataatgtaggcacaggaacacaaacaaatttgaaagctgtttttaaatcgtttgaaaatggctttgattatcatataccttatcaatttgaagctccacgtcttggagatattaaacattcttgtgctgacattaccccacttaaatcattaggttacaaacctaaatatagtattgaagaaggtattacagcttatttgacttataataaacataacaacatcactatttaatagaaaaacggttagcttttattaatatgctaaccgttttttactatttgagtagtttataaaattctttaagtgctaattgattatattcttgtgcgttaaacacttcatattgagatggttgtttttgaatacactgttctaatgcgacggtgatatcatcaacatcatgactcacaagagtaccatatttaccattaccgagtacatagcggtttgctataatatctgacgcgataatattaacttttaaagttaatgcttcaagtaataccattgattgtccttcataatgagacgttaagcagaagacgtctgcttgtttcatgatatagtatggattcttcctttgacctaataaaaagacatgtttttctaatttcaacctttttatttgttgttctaattgaacacggataggaccttcccccataatatataactttgtatgcggatgactgacatgtactttactaaatgcatcaataagtaagtcgaagcctttttcaggtgataatcgtcctgcagttacaattttgaaatcgtcttccttaaatggtactgaacttatatctccattattgatgcgtacgagtacggattggtgttgtttttcaaatttttcagagtcatctaattttaattgattgattttattcaaattaatcgtatttctggaagtgacaaatttcttattcaatgatttatcattcatcttctgtttattttgatctttagaagcatcggatacacatactaattgatcaaattgactatacagcgagagtacaccttttaaattttgataatgtattttaacaccgttaacttttcttttcatatctgctttaatatcactatgtaaataaatcaatttacgttttacttttgttgctaaaattaaattagcccaaaacatagaatacccactaaaatcaatcgcatagtcgaattggctatgacctaatacttttcgcatttctctttcgtatactttcttcggatatatcaaatgctctaacgtactttttaatcctctctgtcttacgaaatcgatcctatacgtttctttcaatgatgctgctaatggaggtactctcaaaataattctaacgttcttattaatactatttaagttatttaaaacttcaagatttttacttttattagtaaacaatgtaatgtcatatgtttcataatcgacattttctaataaattaatgatagacgttgtaataccattatttttcatacctccaggataaattaacactcttttcttagcacagatcttacgtttaggacgcttacgtttaccctcaaatagtatgttaataagtgtttcagtaacagttccatcatctagataggtatattgatttttaaaatattgatattttttcttcactgaatcttcatcatatactttttgcttaatcgctgtaatcacatcttcaatatgatgagcgacaggaccaggtaggtcacgattagcaatatacatacctcgtgatgattgatattcatccaaatctggagtatagaagacaatcggtttattggttactaaatagtcaaagaagatacttgaataatctgtaatcattaaatcaacgatcgctaatatttcattggtatcaaaataatcaggaattaaataaggttttaaacgttttattttaagcgcgtctttatataaataaggatgtactttgactaatacttgataatctagatgatgtttaagtttttcaacttcttcaacgatatgatttaaacttgcctctggtgcattgacatcctcgcctctccaagttggacaatacaataaaatactttgttctttactaatatgaagataatgattcaactcgctaatcatgtcttttcgatttgaatttaaagttaaatcgattctaggatatccaatttccaaaaattctccaccataaatattttcaagtctaaaggctcgtttaaaaatcgtcgtcgtatggtgattaggactaattaagtaatcgctgcttaaaaagtttttaataatattttgagaaccatatagactattttcaatgtctaatcccatatattttaaaggtgtcccatgccatgtattgatatagatttgctttggctttttaatgaaataggatggaaaagtagaattattaattaaatacttactctccgttaatgctttcaaatattctcttgattctttaataacaaactctacatttttatagtgcttaaatcttgctttataaaatagcaatgtttcgttatgatctactacccatatgtgtttatatttacgataacgaggttgctgaattaaacttttaaatattgcatatggactatctgtgatactttttccatctctcacttgatataatatctgatattccttaacattattctttttataatatttagcgtaagtcattactttacttgtataagcagatttattttttcttcgtattggcgtaaataaaaaattcgatttacgtcttaattgatttgtaagacatgtcttaagtgtcatattcattatcctttctaagttgcttttatttctcttaagttgtttcattaaaatgaattgaacgatttcaatgatgcacatatagtaatacacatattcagcactctacaattatatcatttaattatattatataataaatatttaatttcaatacacattgttattttatataaaaaatcaacctttaagtatacgtgttcctacttaaaggttggttactatattattcaaagtgattaggcatatttattgtttcattttggtcaatcgttcttatcacttttgctggcactccagcagctaaactattcggtggaatatcgtttgttacaacactacctgctgcaataactgagccatcaccaattgaaacgcctggcgtaactgtcacactcgcaccaaaccaaatattacttcctatatgaataggttttgccaattcccatcctttattacgatcttgataattaagtggatgatgtgctgtatatagtccacatgatggtcctataaagacgttatcgccaatcgtaatgccaccaccatccattaaataactattgctattgataaacacgttttctccaacttttatattccaaccataatctgtgtcaaatggactgctgattgaaagttgtttcgcttcatagccaagtaattcttttaaaatcgcttgtcgtttttctctatcactaggtcgcgtatgattatattcaaagcataagtctttagcacgctgtctgtccattcttaattcctcatcaaaatttgcatcataccattcgtgtgctaacattttttctttttcagtcattgtcttttcctcttttctttctataaatataaaaagtattctccctacggttatacgtagacagaatactttattatcttcgtaagtactacatactaagacgtaatatagtcgccaccattaacatggataatttgacctgtaatataagaactatctgcataacttgctaagaatacataagctggcgcaagttcagcaggttgaccacgtcgacccattggtgtatctccaccttgattttctaccttatcttcatcaaatgttgatggaattaatggagtataaattggacctggcgctacaccattaacacgaattcctttttccatcaatgatgttgcaatagaacgtgtgaacgacacaatagcacctttcgttgctgagtaatcaataagatgaccagaaccacgataagccgttacacttgttgtattaacaattgcatcacctttacttaaatgaggtactgcagcttgtgttaagaaaaacatcccaaaaatatttgttttaaatgtttcattgaaatgttctggtttaatatctaaaaagtcttcattaggaaattgcacgccgccattatttactaatatattgagaccaccaaaatcgttaacaacattttcaataagttcttttgattgatcagcatcttttaaatcatgagaatatgcttttgctttaacgccgatttcttttaaacgattgacagtatcttcagcatcttcatgttcattataataaccaatagctacatcagcgccttctttggcatataaaatcgctactgaacgaccaataccggagtcaccaccagtaattaatgcgacttttccttttagtttaccgcctgctttgtattcttccatttcagcaataggtctaggatccatgtctttttcagaacctggttgtttttcttgtgtataacctttaatttttttatgaaaatctaataagtccatacatcttcactccttctttatttacttaaccgttcccatttctttaatttttaaaacaaaatgattacacttactacttttgaatgatataaagtccatactacagatgcatgaaattttaacatagaatctttataatataattaatctaaaaatgactcatatagagataaaaaaggagtgttacaatatgaaaggcattctaaagggtatcattactattcttatcattttagggcttgtaaaaacagttcaagattatgatttaatgaatgaagctaaccaatactataatgaagctaaaagtggtgaacttatacaatctatcactcacccaaatttcaataattttaaagatttagatttaagtcattttaaaccatctgatttcttttaatattcatagctatcatgaataaaagaacaatgtactcattttatttagggtaacgttgttctttttttattaagcaaggtcattgactaatataccctaagggggtatattgaagatggtaggaggacaaaaatatgactcaaaatcatcaaattaccttgaatatcattggtatgacatgtgccgcttgttctaatcgtattgaaaaacgattgaataaaatagatggcgttcatgctcaagtgaatctggcaactgaaaaagcaaccattgattatcctaatgatcaatatgaagtaagcgattttattgaaacgatccaaaaattaggatatgacgttgaaacagataaaagtgaactagacgttataggtatgacgtgtgccgcttgttctaatcgtattgaaaaagtattaaataaaacaacaggcgttaagcaagcaacagtcaatctaaccacagaacaagcaacgatcgattattatccaggtcaaactgatgttgatacgctcattggacgaatacaacatctcggctatgatgctaaacctaaacaatcaaaaaaagaacaagcttctcgtaaagttcaagaattaaaaagaaaacgtaataaactcattatttcagcaatattagcttttccattacttttaactatgcttgttcatttatttaatataccgttacctgaaatatttatgaacccttggtttcaatttatcttagccactcccattcaatttattataggatggcaattttatgttggcgcatacaagaatttacgtaatggtggtgccaatatggatgttcttgtagcacttggtactagtgcagcttatttctatagtatttacgaaatgagtaaatggttattagattcaaacacacagccccacctttattttgaaaccagtgctgttttaatcactttaattttatttggcaagtatttagaagcacgtgcaaaatcacaaacaacacatgctttaaatcaattattaaatttacaagccaaagaagcacgtcttattaaagatgatggaacagaaacaatggttccgcttcaaaatgttcaagttggagacacattacttgttaaaccaggagaaaaaatcccagtagatgcgaaagtcattaaagggacaacaacagtagatgaatctatgctaactggagaatccatgcctatagataaaaccgttgataatgaagtgattggtgcaacactaaataaaaatggtgtcattaccgttcaagcaacaaaagtaggtcaagatactgctttatctaatattattaaagtagttgaagaagcgcaaagttcaaaggcacctattcaacgtttagcagatataatttctggctatttcgtacctattgttattggtattgccgtactcacttttatcatatggattatcttcgttcatcctggtcaatttgaagatgcactcgttgccatgatctctgtattagtcattgcttgtccatgcgcattaggacttgcaacgccaacttctatcatggttggtacaggacgtgcagcagaagaaggtatcttgtttaaaggtggcgaatatgtagaacgtactcatcaaattgatacagttgtatttgataaaacgggtacattgacacatggtacaccagaagtgacttactttaaaggtgatgatactttattacaatatgtagcttctgctgaaaataattctgaacatcccttggcaaccgcgattgttaagtacgctaaaacaaaacagcttactttaacaaatatagagcactatgaaacattaccaggtcatggtattaaagctacaatcaataataagacattattcataggcaaccgatcattaatgtcaaatcatcatattgatacagcatctttattagatgaaattacccaaattgaacaaaaaggacaaactgtcatgttgattgcatatgatcagatattacgtggttatatcgctgtagcagacactgttaaatctgaagccaaagttgcagttcaagaactaaaagacatggatttacgtacggtaatgattacaggtgataaccactctacagctcaagctattgcaaatgaagttggtattgatcatgttatcgccaacgttcttccggaagataaagctaaacatgttgctcattttcaagataaaggtgaaaacgttgcgatggttggcgatggtattaatgatgcacctgctttagttcaagcagatattggtattgccatgggaacaggtactgaagtcgcaattgaagcagctgatattactatcttaggtggagacattgccttagtacctaaagctattcacgcaagtcataaaacgattcgaaatattaaacagaatcttttttgggcgttcggttataatgctgctggtattcctattgctgctatgggcttactcgctccatggattgctggtgcagcgatggcattaagttctgtaagcgttgtaactaatgcattacgtctaaaacgaatgaaattataaatgaattttaaactttatactttcataaaaatttaaaaagcgtaaaatatgggtatagtaattatgaaatattcggaggtgacaatcaatgattaataaagtcattaaagtagatggtatgagttgtgaacattgtaaaaatacaatcgaatcagcattagctaaaattaatggtgtcagaactgctgaagtagaccttgataaaaacgaagttcgtgtagattataatgatgaacttgtttcaacaaaagacttacatgacgctattgaagatcaaggctatgatgttaaagaataataaaaaagttggaggtaatactccaactttttttattttaatttacccttagtttagtcgtaccactagttaaaacatccatagttgcatcaagtgcatctactatgagatttttgacagctgcttctgtatagaaagcaatatgtggtgttaaaataatatcttctcttttgataagttgctttaacagtacatcatctatctcttttccacgataatcacctgggaataatcctctttcatattcatatgtatctaatgcagcccctttaattcgaccactatctataacagaaagtaaagcttgtgtatctacaattgatccccttgccgcattcacaaatacggcaccttttttaaaatttgaaaaaacaacgtcattaaacaaatgatgattatatttcgtagctggaatatgcacggtaacaatatcagcttctttaattgcttcttctaatgtatctttataatcaacgaattttgctaaagcgttatttggaaatggatcataagcaacaaccttgctgttataaccttttccaaaaatttctgccacaatcgaacctatgcgtccagtaccaattactgccacagttaagtctcggatagattgtgataatatagaaggttcccaacgaaagtcataattatgcactttatgttgaatacgtttttgataccttacaatattgatggcttgtgtaacagcaaattcagcaattgaacttggagaatacgagggtacatttgagataatgatgtcgtacttagtagctaaatctaagtcatacgtatcaaatcctgcactacgttgtgcaatttgcttaattccatattgtttcaatttcgcaaaaatctcttctgtaattggatgttgttgagataacgatagaccatcaaatccttttacagtatcaactgttgtctctgttaacatttctttagttaaatcaacatcaacattgttttgtttcgcccactcgttaatatatggtatatcttcatctcttacactcataattttaattttggtcatatattgatcctcttccttcataattttttaactatgctttgctttatacatatcagctaggtcaattaacctactagctgcttcttctaaccatttatcatctaatgcaagtgagatacgcacgtaatgttttccattttcaccaaatggtatacctggagcaactaaaatagatttctcttttaataaatattgttcaaaggtttcactatcataacctggaggtgtacgtaaccatgaatagataccgcctttagaatgcacaaatggtagatgggcttcacttaattttgcttcaaacttatctcgacgccgtttaaatgtttcattctgttcttctaaaaattcatcataatgattaagtgcatacgtcgctgcatcttgtaacgcaccaaacattccagcatttgtatgcgtttgatatttctttaatgcttgaatcatgtctttatttcctactgcaaaacccactcggaaacctgacatattatatccttttgaaagtgagaaaatttcaatagcgacatctttaccgtgttctgaagcaagtatgcttggatttttagcatcaaagccaaaagcactataagcaaagtcgtgcacaatttttgtatttgtacctttgaatcgttcaattgcttcatcaaatacttcttttgtagccgttgatcctgttggattattgggatatgttaaataaacaagcgttgtattgtctagtactctcttatctacattatcccaatttggcaaataatctggaggatctaaatttaatggaaccggattggcatctgcgagcatcactcctgctaaataatctgtatatccaggatccggaagtagcacattttctccaggattaacaacacatgtaggtaaagctactagtccattttttgtaccatataaaatacatacttcatcttctttatctaatgtcacattgtactgacgttggtaaaaattaacaatggcctctttaaatgattctttaccatgaaaggcaccatatttttgattttcaggaatccgaatcgcttcagaaaaatgctcaataataccttctggtgtttcaccatcgggaatgcctactgccatattaataagtggtaaagggccatgttctactttacgtcccatcgtttttccaaaatagctatcaggaatggctgctaatctttttgaaataaccatgttattcctccttaaataaaaagctatataccacttttgtgtggcatatagcttcatgagatatatgtcacttatctttgaggttatttattatcctcttggagttagcacagtactttatatttatgaagcctgttgctgaagtttcattgggccaaatcccttcacttctctcgataagttcttacgtattaagtcttattttaacattacactgataattgtcaattttcagatttatttattctatttcatattttttatatcttctaacatagcctctgctgttattttagcacttgttaatacaatgggtacgtctccgtctggatatatgcttgctttacgcctgaaaaatataaatctatataattacaggacagataataattattttgtgtctcagtaaattcactaataaagtatttaatatatcatttattttaatataggcagacgctctcacaaaaataataactgacagtatagaaaaccaatgaactagttcaatacatcacattacgatagtcatcttataaataaacatcttctttagttaaatttttttatccattcatcgtttagaatatacatgacattatttaataaaaaagaagtgggatagaattcactttgaattcgtcgtcccacttcagcaaaaaagactaaagttgaaaaagcttaaacaagcacattttcaattcagttatcaattgtcaatatattaaaaatacctgagacatttaataatgtcccaggctttatttcaataactcgatgtcctatccagttatctacttaaatcttaccaccaaccgttagcattacggaaagcaattgctgcatcccatgaaccgtaacgtgatttagcatagttagccataccttgagtttgtgatgctactgaaccagtaccccatgattgattagtttggcctaaaccatgatattgaccattagaagcatttgggttaccgcttgattctggcattacgatagcgttccatgcagcttcagtaccaccgttagctaagaattgagctttaactgatccaccagttgaagcagttgagtatgaagttgtttttggtgctgagtatgaagttgtacgagcactgtagttattgtagctagacgttctttgtactggagctgaaacagcttttacatttgaagtgctagcttgattatttgaacttactgattgagttgaagcttgattataagactcagtgtagtcagtagttgattgagctgtgtcagcaccaccagtgtaagtatagttccaagaccaagtgttaccatttgaagtaaagttatatttgaaaccgtcttttacgaatgaaatgtcatatgcaccagcttgtactgggtgagcatttaattcagatgggttattttgagctaagtcagctaaatgagaatagttagttgtttgttctgatgcatgtgcactgtgatcgtttgttaaagcatatcctgttaaacctaaagttactgctaatgacgaagcgattactgtctttttcataataaataattcctccaaaattgaaatatatattttcgttatgtttcgttctttgtttaagattaatttctgttttgatttgttgtttaacttttgacaatagctactataacacaaaattcatagaatagtattacgctttttttacaaaaaattacaattaatccatcattttgtaatattgaaatatattaaatacttcttgtaatatataaaatctatcaatatggagtttatttttattataaattaacgttttacaatactttcttacaaaaattacaatactttaacatcattagtaatattacaaattaatgttttgttacattactgtaatatttttaaagtgtaattggctatttaaattctttatttttgataaaaaaacaagagcttgtacgtattcagtttccttatttatttttaataatcctttactccccaaagtaccttttcacaattacgaataatatattttagtatctcaatacgagaggtttttttatgatcagcagggaccacaagccatggtgcataggatgtatttgttttctcaaccatatcgtgacttgattccacgtataaatcccatttttctctatttctccagtcttcatctgtaattttccattgtttattaacattttcttgacgatctttaaaacgttttaattgttcttctttatctaatgtaaggaagaattttaaaataatcgctccttcatctgtccacattttctcaaatgcgtttatttcatcatatgcacgttgccattcatcggcagtagcaaaaccttcgacacgctctaccaatacacgaccataccaacttctatcgaataattcgatgtgccctgttcttggcatttctttcgcaaatctccataaataatgatgttttaattcaacatctgtaggggcactaatgccattcactcgataacccgttggatctaatttttctctaattcgtttaatatttccgcctttaccagctgcatccataccttcaaatactaaaataagtggaatctttctatcatataaagcgaattgaatttctctcatacgattttgcaattcctcaatgagctgtttatattcatctttttttactttatccacctttctatcaaaaaggtgtgttttaaaattagaatgaaatttaccgtctcgctgttcttctttttgctcatgcttctcaatcgctgtttcaagacgtttgataatatgttcatacattgtttcaatcgctttttctctttcggtataatcaatgatttcccatgctttatcattttttataaattgacgcatgtctttaagataaatatctgttgaaagtacattactatattcttgaactttccaacgcgtcaatggattatctttggtttgttgaatatgttcttgacgtttttcttcattaatttctatgaaaaacttaatgatttcatagtgatcttgtttaagcatattttcaaaagaagaaatttgttgtttgagtacatcatagtttttatatttggcgtgtttaattttattttctctataatctagataatgagaataccaacttctaaaataaatatttatatcaccttttttaggtaaggtattccaatatttttgtaaaaattgatatcttaaatcatcctgtttaggtgactgtgtcgcaataaattgtgtatacttcgcatctaaatttaataataactcattagataagcgcgtcttcccagatgcaggtacaccctcaaataatatcatcactggaatgcctagttcatgtgtacgtcgtgttaattctgctgtttttaatgctaaagcttcaatttttttcgccattaacccttcatccttttaatcttttttctattttattgtaacattattggcgtttatcgtttaaatttaaaaatgcctgagacaattcatcatgtcccaggctaatgcgtttatcccataaatttgtaaatatcatttgtgaataattttaagactctgcgtaaaataacatctagtataaatgctgttactaaaggtacaacaaaaaatccaataataattaggatgatactcataacagctgaatcaacgtgtaaaaatttaaatgcactaatcggcccaatcataccaataaatccaaacccagcagactcttttgttccagcaataccgataagactacccactacaccagaaaccgctgcggtaatcaaaataggtagcataataattggatatttcaccatatttggcatcatcattttcacgccaccaaagaaaatagaaattggtactgcaacacgatttacttgacttgtgccaataagtaaaaccgcttcagtagctgaaataccaattgaagctgaaccagctgccaaacctgtaataccaatggcaatagcaatagctactgttgataatggggaaataataataaaactaaataccattgagattaacatacacatcaatacgggttgtaattcagtgaaactattaatcatattaccaatcgcaatatttatagtatgtacatatggtagtatgagcacaccaattgtagctgagatacctccaacaattgttggataaacaattaatgccatacttcctacacgtttttcaataagtagaataaataaaactgcaattgcagcagtaatcatcgtattgattagatcaccaatacctgcaataatccaagccccattcttaaattgagcagcaccacttcctacataagctgcacttgatacgactgcaatcgcaagaggagtcatattaaatttaatcgcaattaacgcacctactaatgctggtacagtaaattgtaatgcttgaacaacatgtagtaatgttgcaaaaataggatggtgatgcataagagctttaaagatttcacctaaaatggcattcggtactaaacctaccacaatcccaatagccactccggaaagtactctaaaaataaaatctccaacgcttatttttctaagttctgttgtcattcttatacctcctataatattttgttgttgtattaagtaatgataaaaaatactataacacattttctaaattttcagaatatttattttatcattttcttaaatttttctagttttatggatattttaagaattttgaccaacaatatatatgtaatttaaaaagaaaaaacaaatttcttctattataatagtttaaaatagaaagagtaatcatactctttgacaaccttctttgttcgtttaataatttaaagtaatcacattttaaaatgaaaggggtgtctttgtgccaagcaataaaatggatccaagagtcatacgtacaaaacaattactcgtagaagcatttctaaatgtgtcacaagaaaaagaaatgacccaaattacagtaaaaaatattactgaccgtgctactgttaatcgggctacattttacgcacactttaatgataaatatgaaatattagattattcattatcaatgactgttcttaaagatattaaagaaacgttgtctatttcagaaacgctcaatggtcagattatctctaaattatttgtctcgatagcatattatttggaaaatgtacaaaatgcttgcaaactcaatcgtgagacattttgtaaccatgctcataaatgcattaacaacgagttggaagctatgtttacccttatgttacaacataaatatcccgagcacgattctagtattattgaaaatagcgcaagctttttagccgctggtttatgtggactggcaagacattggttaaatacaagcgaactaagtgctgagcaatttattaatcaaaacttaccatttttacttcaccatattacaaatctataattctataaacaacacttacagtcttaatgattgtaagtgttgttttatagaaaagcatgcgacttgcataaaatgattatttaggttatattataaacaacacttgttgtttagataataagtgttgtttatgtaaagtttagttaggagggatgatatgtccaagatagaaaatcatgagggttttaaacgtacctttaaaaatcataaattaacattaggtctatccataccatttgatagtaaaaataaagagtatattgattttaatgaacaagtgaagtttgcacaacaagctgaacgattaggatttacaagtttattcgtgagagataatccactatatagtcctcatttaggatctgtaactgaaaattacgacccatttgttttcctaacgtatttaagtgcgtttacctcaaaaattgcacttgggaccagcagtattgtggcaacgttacgacatcccattcacctagctaaatcatcagcctcacttgatcttatttccaatcaacgtttattactcggtatggctaccggtgatcgttctttcgaattccctgcatttaaagtagatgaaagtgaattaacagaacgttatcaaacaaccattcaatcattaagagcactttggcaatcacattctcccaacatttcaaattcaatttttgaattatatgaggattcagggttacaagtattgcctaaacatcttacaattccgatgtttggtacaggctactcaagacaatccatgtcctggttacaacagcatatggatggttggctattttacgcacaaccttttcaagatcaaaagaaattagttgaagcttggcacagtggtaccgaccgattcaaaccgtttatgaatattctaatgattgatttatcccaaaatccaaatgaaaccgtaaaaccgattaaaggtggtttccgtactggacgtaaaaatttactacaaatattaaaagcttatgaatccattaatacaaatcatattatcttaagatttacaaatgatgatcgtgatatcgaagcacttatagaagaagttggaacgtatattgtaccccacttcccagctcatacaaattaggaggaataaataatgagagaattactagatagaattaatcaattagcaaataaagaaaaagttgaaagtttgagtgttgaagaaaaacaagaacaacatcaattaagacaagaatatttaggaatgattagaggccaagtccttcatacattctcaactatgaaagttgtcgatccacttggtcaagacgttacacctgataaagtgtatgacttaagagaagaatacggcaacattcaaaaaaattaaaattttattatcaagacttagactgccttcaaagttctgactttgagggcagattttttatgtccatattttgagtaaagttcttaattgaatcacagctcattttgttgaaaccctttcctagagaaaatataaagtagttctttgattttaataattaaaactacttaatgaagtgattgctcacttatgttcgtttatgcgactgattctatatgccactcaacaaatatatttcatagtctatcgtagaatagttcaagccacaaatatttatttataagatatattcaggtatagaatcaaacatcataacttatcacgataataattatgatattatataaaataaatatataataatatataaaacaactaagaaggtgcatctatgaataaagtatcatataatttcccaccatcaagaattgaaagagcaaaagataaattaaaaacatttatttataatgaatattattttagtcctggcgataaagtattagaagctggatgcggggatggggccatcctattcaaacttattgagaaatataaaattgaaagacatggtattgatatttctgaaaatgcaaaaagtattgcaactgagtatatgattaaaactggaatcaaatttaagtatgttattggagatgttcaaaatttaccttaccctcaaaatacatttgatacagttagttcattaggtgttatagaacattttctaaaccctgataaagtcatgaaggaaatgtatagagtattgaaaactaatggacaccttatattaatgacaccaaataaatattcgtttggtattttagataagaaaataaaaattttattaaaagtttggaaatttggttatcaaacggaatatagcgtaaatgatttagaaaagatagctaataaatatggttttaaagtagtctcacgaaagacttttaagaacgactcaatcagttttaaactgatttcatcaattgatcaaatattaaatgtttttaataaaaattttggattctacagttatatctacctcataaaggaggtagataaaaatgattataaatcatatcaaacttcaatttaatgagacagttacaaaatatgattctgttttaattgttttaacctatcaaggaaatcttgtttttgttaaaaataaaaaaagagcatgggaattaacaggaggtaaggtaaaccataatgaaacgatgaatgagacagctatcagagaggcttatgaagagtctggcgctgtcatcaatgaaagtgatatagactatttaggttactatatactaccaaatggccataccactacaattacaaaagctgaagtaagctattttaaagatataccgaaatattcagaaactactgaaagaatacttacgaaagaaccattagacaaaaatttattatcatttcaagatgggttatatgaagaaatttttaaatatttaggggcataccatgaataaggttaaaaaagggtatttatttaatattatttccgtagcaatcatgtctttaaccccaatattaaacaaactttcactcactgatttatcacctattcaagcaagtttttttaatgctttgttttcaactttaatattattaataactgtattactcgataaaagtaaaataaaaatctatcataacaaatttatatggctcttaggtattactaatacaataggtattttactccaatatgtaagtttaagtttgttagatccagttagtgttggattattaggaagattttatattatatttgcgttgtttctttcagtgctctttctaaatgaaacgttgtgcaaaaacgatacccttcctataatttttgttgttataggttcattcttgattactcatttttcaggtgattttaacagtatattaggtgtgattgtcaccctatcttatacattcttttttgcgctaacgaatatgttagctaaaaagaccgtcaaagacattgattctaaaaccatcttactatacaatcaggcgacttctactttgttgctaggtatcatattaattgtgactaatcatttacataccatacatataagcataggcttgttctctattttactttctgctttgtgtagtggcgtaataggacttttattattttatgaaggtttgaaatacatttcgtttcgtgaagcgaatattataagaaccctcaatcctatatttgtgtttatattttctttcccgtttttccctttaccattaacgcctaaattcataatcggcgcgattttaatcattatttctattatttatatgaatctatataaagataaaaaaacgtcttcatgataactttttcattaaaaatgcgccccaccattagatctcattctaactttggggcgtatattaattggcgtattttataaaattaattgaactaacaaactaagaaattatatttatgtccatctggatcagcaaatgttgcaccgtaataaccttgagaagtcttaggttcatcaatcaccttaccacctaatgcttccactttatgcattaattcatccacttcattattagttttaacacctaatgatataatcacttcattaaagacgaaagaaacaacttcggattaagacgacttaacccgaagtattttattaggccaatatgtgatccattgaacgattcacactacttgcatacataccaccaaatttaactaaatgcaccatgaataaatataatctatagaactctaagcgtttttctgctccttttcctaaaggataatgcttttcatattcattataaaactcttgtgtaaatccaccgaagacagtagtgatacctagatcaaattctctatctccatataacggcgctggatcaaataaagcgggacgcccatcttttaaaaacatataattaccgccccataaatcaccgtgtaaaagagacggtttgctattatgattttctaattcattaatcataacagaacgtgcttgttcgtatactttattatcttcttcattccataaatttttacgtaatagttcatctcttaaatgatccatacgccgttctacaaaaatttcactccaagactctgaccatgtattatcaaatgagacatcagccccttcataaggtaactcgaatccaaacttaccttctgactgttgatgactatgcattttggctacaagttgtcctaattctttttgacttcctttaccgccttcttctaaataactgagtaatagatacgcatcgccattaatttcgccattttcaatcactcttggtgctgtaatatctgctttttcaaatgcttctagtccagccatttcggcagcgtagaaagagggtttacgatttctttgaactaataaaaaatatatatcatcgtttgttgtaattttaaatgcttcatttacatctccaccgcttactggtgaaatatcttgaataccctctaaaggtaattgatttttccaatctgatttcattaattatcctccttagtccaattctttatctactattctattacctaaatggatgtgctttaacctttgtcattccaaaatgatttaaagttaggcaatttttcaaacactttcaaatttgactattcatttttaatcgaacgtgctagtctattaaaggaatgttttttcaatgatattaaatgaggatcgtaagcctcaaatacaatgaaatggagcattattatgtacaaattaattaaacctcttttattcaaaatcgaacctgaaaaggcacatggattaacagtagatgccttaaaattcactcagaaaaacgcttttttactaccttttgtaaataaattatttacatatgaacacccctctctttcacaaaacattaaagggataacatttaaaaatccagttggtttagctgctggttttgataaatcatgtgaagtgcctaaagcacttgaaaatgctggtttcggtgctcttgaacttggtggcattacacctaaaccacaagatggcaatcctaaaccgcgtatgtatcgcttacttgaagatgatgccttaatcaatcgtatgggctttaataatatggggatgaataaagctttatggaatttaagacgtcatgcttacactattcctgtaggtttaaatgtgggcgttaataaaacgacaccttacgaagagcgttatcaagattatattaaagtcatcgatgcgtttaaagcagatgtatcatttttcactgtgaatattagctcacctaatactgaaaacttacaaagtttccatgataaagatgaattttcaatgttatgtcatgctttaatagattataaagcacaacacgaagtgaatgtcccaatctttttaaagctaacttcagatttagaacttgaaggttttaaaactattttacctcaaattacagaaacctttgatggtatgattttagccaataccacacgtcaacgtgatggattatcttctccaaataaagtagaagacggaggattaagtggtcgacctttatttaaacgtaatttagaacttgtaaaatgggcttatcaacaaacgaatggcgaatttttaatcattggtacaggtggtatttttagtgcacaagatactattcaaatgatgcgaaatggtgcgtcacttgtacaaatctactcatccctcgtgatagaaggccctggtttaactaaaaagattaatcgagatattgctaaatatttaaaagcaaaccattatagtcatattagtgagattattggactagatgctagacgttaaaatatttcactaaacgataaagtgtactatactaatattacacgtagcacgtactatcggagggtatgttgatgactatagaagataaacaaacaaagtcacaaactaaagataagaataacattgaagatgccaaatcttctcaagaatacgataatagtatcggttacaatggtgaaaagaaaacagctttggatcttgaaattgaacgtgaactattagaaatgatggaaaataaagatcctgaacctgaaaaagagaagaaaggtataaaaattgctggactactatctgcccttgttattgctattttagctattgtgcgttttatccatcgtacgttataactaaaagcgaaggagtaagaaagaatggttaactcattctctcttactccttttaaaattgttctaaaaatgctttagcttctcgattaatttttttaaaatcaataccttgttccatcgctgcaaatacacatccgcaataacattgtctaaatatattataatcattacacatttctatagaccgttcgtaacctttatttttcttaaaatcactaggtaaataatatgtattgtataatcgttgaacttccataccgagttcgttaattaattgagcattctttttaggagataatgttaatgcactaccgaaataatcatatccatacttcactgctgcttctgcgacaagctctaaacgcatctcaaaacacgctgtacaacgttttccaccttcaggttcttcagtaagaccacgcgatttcgccatcttcatgaattcatatggctgataatcagcttcaatatattttaccgaatatccagtcttctcattaaaatcttttacaaattgtgcttggactttggcacgtcttaagtattcatttttaggatgaatgttaggattagcaaaataaatagcaatatctgcatactgagatagatattctaatgtatatgtgctacaaggtgcacaacaactatgtaataaaattttagggcgaacgccttcacgctcccattgattaatcagttttttcaacaccctatcataattgattttttgatttttcatcttcttaatcataggttcagcatttaacatttctcaattctccttataaaatattatatattatttttagtttgagacttatacaataaaaatatatcagatattatcgacttactatatcttgaacttttttaatagcctcatcttctatttctttgaaaatttttattgccctatgtattttttatattatttcttaaagatggtgattacttaaattcattaatgacacgcgtatcacattgagtacatacattttaaattggaacaaatttacttccataatgcttacaataagccactaaaacctcttccaaataatctacgtagtactccgaaatcatcgaattgactaattaacgatgatccaaataaatgtaatgcaaatccaataataacgaaaaatatgataacaccgtaaaaactagggatacgtaattttctatttacactatatttagcaattaaatatatacatgatgtgaataataagataatcgaaaatactcctaataccccacttaaaatataaagttttaaaaatagtgaaataaatcctaacaaaagtataagcactgataatgtattcgttaaaataaagtctgacaaaacttttttaatttgaaaaggttgaagtacagttaaacgtatcactccataagtaataaagaaaagaatagctatagcaatagcgatgcctagtattactcttagaacaatagtaaatactcctgaaacgatataaccaaaactatcttcaatcataaaatgaataaaaaatcctaaaattaataagcccactatcactaatgaagctaataatgagtaactaaatgaatgatgactctcaatgattgtatcatgccgtttaaacacttgtttaaagaattttttactttcttcgacaacagatttaactttttgacttgaagcaccaggattaccataacgttgttgataagatgtataatcaggtgcatcttgcgtttgagatgactcaatattgttgtattgattcactgtaggctgttcttttgatacagcatttggcgaagtaacagaacttgaagtagaaagatttatacttttgtttacatgactatccaagtttaatgattctggtgttattgtagatggtgtaatctgatctaatttcgttccacattctccacaaaataaatctccttgttgatatgactgaccacaatttggacattgcatcctatatacctccataaacataaaattcgaactcattataccattaaattgaattgcttaaaatattattttaatgaaataaaaaagttcgaatcttaaacgattcgaactctaatgatgatatattattcagcttctctaatttctgcatcgatatctgcataatcaatttcagtattagtgaatgttttattatcgattgggaagtgttgttcaaatgtttcaaagttttgaatttcaacttttacatcatctacttcaaaatctaaaatgtgtccgccgaaattacgatcatcgttggcgaaatgaatatggaaaccaccagaaccaataccatggaataattcaggtgtaaagaagccaatcactgtaccgttaacatcttcctgagtttcttcaggttgtctacgtgctgaatcaattaatcttgtatatggtggttcttgttttggcatcatacgaacatgcatttttttaaatttaccagtgatttttactgctgagaataaattatcacttaacatatgttcttttacttcatttaatactgtttcagaatctttattagaagttttataagattcatctgcttcaaatttagtaattgttgcaaaaggtgttaattcatcacctttaagtttaacgaattcttttttttcatttgcatggtaagcttctccattaatgaagataacttcaccgtctgaacctgtaagtgttgctagtcctgaatcaccatgttttaataattcatcgattgtggcagttccttctaataaacctgccatcaatgtacctaatgtaccatgttgatataatacatgacccatattaatattcactcctatttttagaaaattaatttaaagaatctggtaacatatttgttgataatttaatattatctttataatttactggaatatcaattaaaacaggtccttctgtttcgtaaccttctttaattgcagcttcaagttcttctgggcttgttactcgaatacctttcgcaccaaatgactctgcatatttaacataatctactggaccaaatgctacaccagctgcacgtttatatttcatttcttcttggaattcaaccatgttgtatttaccatcattccaaattaattgaatgatatttaattttttacgtacagcagtttctaaatcttgacctgagaataagaaaccaccatcaccagcaactgatacaacttgtgtgtttggacgtactaatgcagctgctatagcccatggtaacgcaacacctaaagtttgcataccgttactgaataataaatgtcttggattgtaacttctaaatttacgagccatccaaatataatgactacctacgtctactgtaacagttgtatcatcagttaacgttttttgcattgtattaataatttctactggatgtaaaataccatcttcatgttcatatttaataccagtagcttcgataatatttgctcttaattcttctaagtcatctaaatgtttttgatcaataattggttcagatactttttctgacatcatttgaattgtacctgcaatattacctactaattcttttttaggacgtaagtaatttgtaatttcagcatgtacttcgtcaattgagataatttcagtatctaattctttattccagttacttgcttcgtattcaattggatcataaccgattgcaactactaaatcagcttttcttagtaattcgtcacccacttggttacggaataaaccaacacgaccaaagaaatggtcttctaattcacgactaattacaccagcaccttggaaagtttctacaacaggtaagcttgttttttcaacaaatttacgaattgcttctgtttctttttcactagaacttctcatacctgcaagtaatacagggaatttagcatctttaattgcttgaagcacttcattcacttcttcatctgttggtacgcctaaatgaggtttttctggtaagtcgattgctttactttgcacttgagatgaaataacgtcttgtggaatactaatgaaacttgcaccatttttaccagaagttgcagtgcggattgcatttgtcataacttcagataatgattcaggatcttgaacctctgcactatatttagttgatgattttagtaacgcagcattatctacagcttggtgagtaagacgtaataaatcatttcgtttaacttgaccaccgattgctaatacagggtcaccttctgaagtagctgttaataatccagttgttaagttacttacccctggaccacttgttactaatgcaacaccaggtttacctgttaaacgtccaatgccttgtgccatcattgcagcattttgttcatgacgtgtaacgataagttctggaccatcatcttctaatgcatcgaataaatagtcgatttttgcacctggaataccaaatacataatccacattattattttttaaagtatcaatgaccatatctgcagcagaatagttttctttagccattttatattcatatcctttcaagtttacatttgtaatttaaattttttatttcaaaattacttttctatttttttatacccaattaaaaagaagccacacacatgtctatttttttagggaaaaagagggaaagacttagtcacatgttaattgcggcttctttatatttaaataacttcaatttttaaagttgaagtgtaacctcagttaattagacatattcaaatatgagatgggagttttctattatatatgtcatgtttaagggaatgatagtaagacatacttattagaacatttgaatacgttgtaactttattacgtttcttattatagtacgcatcgaaacattaataaaatacatattttcgatagtaaccattccatattggaataggtcaatatactttaaccattgtaaaatgacacaattaaaaaggtctaatgacttgacttgtcttctatcattatagtgccaatattgatataattactactttttatatttttggagtaaatatactcttttttgttgtttttattttagatttatctgatataatcaaatctatcatttaaattttctagttatgtattcttgtttgattaaaagtaagaaaacttgaaattttcagaaattttagacaaaataccgttcttttatgctatgataataaatgttatatagctaacaagctaattcattaaattttaaacttattagtggaggttcataattatggccagttttttcaaaaattttactagaaaagaagatcccactatctatcaaagtaaagatggacatttaaaacgtacgttacgtgttaaagattttcttgcattaggtgtaggtactattgtatcaacatcgattttcacactacctggtgtagtagcagcagagcatgctggtccagccgtagctttatctttcttattagctgcaattgttgctggtttagttgcattttcatatgctgaaatggctgcagccatgccttttgctggttctgcatattcttggattaacgttttatttggtgaattctttggatgggtagctggttgggcattacttgccgaatactttattgccgttgcctttgtagcttctggtttttcagccaatttaagaggacttgtgtctcctttaggtattgcgttacctaagtctttatctaacccttttggtgcagatggaggaattatagacttagttgcagcaattgttattattttaactgcattattattatctcgtggtatgagtgaagctgctcgtatcgaaaatattcttgttattttaaaagttttagcgattgttttattcgttattgttggattaacagcaattcaagcaagtaactatgttccatttattcctgagcataaagtcactgaaactggtgattttggtggatggcaaggtatttatgcaggggtatcaatgattttcttggcatacatagggtttgattcaattgctgccaactcagctgaagctattaatccgcaaaaaacgatgcctcgtggtattttaggatcattaatcattgcgattgttttattcgtagctgtagctttagtattagttggtatgttccattattcaaaatatgctgggaatgctgaacctgtaggttgggcccttcgtcaaagtggacatggtgtagtagcagcagtagttcaagctatttcagtcatcggtatgtttacagcattaatcggtatgatgttagctggttcacgtttactttattcatttggtcgtgacggattattaccttcttggttagccaaattaaatgataaacatttacctaatagagcgcttgttattctgactgttatcggtgttttaattggttcaatgttcccatttgctttcttagctcaattaatttcagcaggtacattaattgcatttatgtttgtatctattgcaatgtatagtttaagaaaacgtgaaggcaaagatttaccagttccagcatttaaagtaccgttcttccctgtattacctgtcattacctttttattagtcttgcttgtattctggggattaagttttgaagctaaactttatacattaatctggttcttagttggtattgttatttatgtattctatggtattaaacattctaaaaagaatgatgaagatgattatgtcgtaccaaaagattaagataatgaactaacttatatttctcatctccccttaagaaacattcaattgttttttaaggggagtatactgaaaaagagcaagaaaagacattcacttcacgtcttttcttgctcttttaatatattttaccaaccttgtccttctatactatattgatttaaatcaccatcttgtagtgcttgaagcgcttcttcaataacatctaacgctttatctaactgttcataagtaataacgagtggtggttgaaaacgtaagacgttcccagcaactgcaataatcactacaccatgttcaaaacagtaattacaaattttcaatgcttcttcagcagctctttcttttgactgtttgtctttaacaatatcaattccaatcgataacccaataccgcgcacatctcctacgtaatcgtattgatctacccattgattcatacgttgacgcacgtagtttccttttacagaactagctgttagtaagtcgtcgttttctatcatttcaatcgtagcaagagccgcttcacaacttactggatttgcccctgtcgtaaatagatgtgctggtgcttcaagactttcaataatttcttttcgacccacaatcgctgacattggtaatccacctgctaatgatttaccaaatgtaatgagatctggtgtaaagttaaaatggtccacagagctccaagaacctgtacgacctaatccttgttggatatcatcaacggcaattaaaatgccgtattcgcgacataacgtttcaagtgcttcaaaatagccctctactggttctaatagtccgccatctccttgaatcgtttctaacacgatacaagctacttcctcagctggaacatatttagcaaacatctcttttaatggcgctaaatattcttcaacagtatttgatttagattgttcaaacatccctctgtatttatctggaaatggaatatgataaaatccatttaataatgggccataatgtttacgcatatttaaactgatagccgacattgataacgctccaaatgtagagccatgataagcatttgtaaagctgataatatagggtcgtcctgtataagcacgtgcaaatttgataataccatcattcgcatccgaaccactcaaaccaaatgtgacacgtttttcataatcgcctggcgcaatatcgcataactttttagacagtttcactaaaggctcgtgatacatatatgcgggggtataatgaataaatttatctacttgctttttaatcgcttctgtgacctgttttggtgcatgacccacattttgtgagcttgcactagctaacaaatcgatgtattcttttccatctatatctactaaagttgccccatacccatgatcaatcactaatggataatattttatacgtcctaatgtagcaaaatacttactatcttcttttatcatgtcctctgctttactcaaactgactcatcctctcccaaagtgtcaataacttatatctaactttctttattgacttcaattcttatgataataatcaatatcttactaataattgtcagatttgtaaatattttcagaaaaattaaaatatattgtttctatcttttaaacaattataaaagtaaatcacaaaaggcctctaatagagaccttttatgatttatttgttttcgtatggaataacatcatcaccatattcttttttaatatacgctttgatttctttagattgcataacttttaataatgtttggaatttttcatcatttttatgaccttcttgaacagcaatcgtattcgcaaatggtgatgattcaccttccataacaatagcatctttagacggttttaaaccattatcaagcgcatagtttgaatttataattactgcagctccttcaccattctcatatgtttttggtaaaaactctgccccttgttgatggttaaatttcaagtgttttttattttcagcaatatcttcaaattttgcattttcaattttaacgcctttttttaatttaattaatccttcattaacaaagaaagatagaaaacgtccttcttctgcaggattattagaaacgtaaatcgtcgatccatctggaatgtcttttaaatttttatattttttactatatacacccataggcgttgtaaacactttacctaattcttcaattttataaccatgacttttcttttcagcattcaagtatggaacgtgttggaagaagttcgcatcaacatcgcctttatctaataatttattaggcaccttataatcattaacttctttgacttctaaatcatatccttttttcttcatttcttctttagcttttttcaacacatcaccatgaggtgctggcgacgctgctacggtaatttttttattatcttctttctgatttccacaagccgttagcgtaataattactaatacaatactgatcatacctattaattttttcatatgtattgacacctttttataaattttcaactctcatttactcttactagatatgtaaagacataaaaaaatactttctactattaagagaaagcatcgatacactttctctcatcttctaaagtatgattaactttatgtgaattagcaccatgtcataccatgacggttgctgggtttcgtagggcacatccctccaccactcttgataagagttaatagattattgaattattaataacttatcattgatttaaacgttggtcaatatgtttttttaatattctaaaaatttaaaaagtgttaaaccaaatatttcagggaatattcttatagtatgtatataagaaggaaggaaaattatgatccgttatttttatcattgtcttagtgctttagttataagtattatcttattaattacaatgactatcatggatggcatagttcaatcgactcatcttactttattgttaattaatattgatttcttaattgacccaagcaaaacgccattattattagaactagccattcatatttttataggatggttaatatattttattttcttacttatttatcatgtctttaaaccattatataaactaagttatgtcttattaatgattgtttttgcctctctttatccgtcactcatcgctatggcaaagcgttcattctttcactttaactggacagaatacggtttatggatgattgctcatattatttttatgattttaatggcttgttccatttcatatttttctaaaaagaaatattaataccttatataaatcatgtgataaatattgatttaatgtttacaaaacatttattctttaagttaagttaaagatttattatgattttttttaaaaccctgtttctgatctattcaaatgctacactctagttgtaattgatcatgaatgaaatggggttttcattatgaagaaagtatctttcatcgcatctacacttttaacaagtacaatgctacttacaacgactcaatctgtagaagcacatactgctgacttagtgactaaagaaaacgctaaacaaattgctacagatgcattatctaatagtggaggtaatccaaatctacaacgacttggtcgtactgttgacaaaggcgcatactttgaaattataagtcataatagattaaatgaaggcagtggaatgtataaagtttataaaaatggcgaagttgagtacaaaaatggtacatatagtgactttaatcaacttcaagatacacgtattcatgcagaatcaggtatcgctaaagctgctaaaacaccttcctcttctaatgataaacaagttaattctgttgattgtgcacgtgaactcaatcgttattatgtaggaacagttgcttcttctgaggtgccatcctctaagtcacttaaaaatactcaaacatcacaatcttctgttaaaacactcccaagtactggagacgatacacaacaacactcaactcaacttttagcctcacttctattagttatgggaacttcattattacttaaacgaaaacatcatagtcattcttattgatctactaaacatttttaataaataaaaaaggagtgagtcaacaaattcaaaatgaatgctgactcactcctttcatttaaatagttttacaagataaatcgtttccatactaaattaatacacgagaaacggtctccatattatttatttttattatccgtttgttcattatcttgactatcagaatgttgatcatctttgtttttagtttgttctacaccttcagggtcttgttctttagcattgccttttttaggattataattaacaccttctgtataatcattacctgcattccataataagaactcattcacaccgttatcttttaaagcttgaacttcttcagatatcgcttttgcatcataatcaatataattaccagcacctaaatatgaagcggtaaagtcttgaatccatggtcttgaaataggcttgtctttacctaatgtatctaataaactattttctttttgaatatagcgattaactgttttatatggctcagtatctggtgcttgtaaaccgaaatctccattactccaatgagatggataaatcattgatgaaatggcatctacatttttagaaattttagggaagctttgaccaataccaggtgcattttcaactaatgcagaataaccaaatacatcagctgacacattaactcccattggttttaattctttatttgcgtattctaagaatttagtaattgtatccacacgttgatcgcctgaactcatctgactatttttatattcacctttattataagttaagctatctgcttgattttcaaatccttctgggaagcgtacatagtcaaattgaatatcttggaagccggcttttgcagctgcttttgcaacatcaatatcatacttccatacttctttcataaatggattaacaaagctatcccctttaccatttgtccaaacagaaccatcactatttctgaatgtccattcagggtgttcatttgctaattttgtatctttaaatgtcacaatacgtgcaattggataaatattattatcatgtagtttttttaataattttttaccatctacaatatcaagcgtatttttatccacttgtttattgcctgtatttaatttcatagtaatgttacctgtatcatctttcacatcgataaccatggtatttaaattagaatctttgatgaatttaactaactcatccattttagcaccctgtgtagaattacttgttacataaatccctttaacaccatctttaggatactctactttattttcatttgtatttttatcattattttttttcaatgcatcactttgactattaccactttgattactagattgctcatttttctgatttccatctttttgtccactatcagatgcattatctccgttactacaagccgccaataatagagcacttgttgttaatacagcaaaaattttatttttcttcattactgttcctccaagaaagtatataagtattaattaagaacttagttatcatatataaacgatttaaaaataaagactaacttcaattaataagaacttaacttactttagaatagcatattttaacaaaaaatatacgatacactaaagttttataaaatattctatttaatatttacatatattaaaattttaaagaaaacgtaaagataatgctttagaatcatcgatgatccactgaacatttggtattgatcttttcatttgttgcatgataaattgctcattatttttaggaaaatcccaaatatacgtaataaattcaaaacttaatgttttaggatttcctccgatatgttctctgttaaatagtgaatatatgtaacgcttgattactctaagtatacattttactcttggttctttaatccatatgactttagttgcatattttaatctcatactaagtgtactagaataatttccatcaataatccattcctcttttactacaatagattcaagtttttgttttaattcttcaaaagtaatgacgtttttattattaagccattgaatttgatcaatatggtaaagtggcagttgatattttaaatgtagttgatatgccaatgttgattttccagaaccagggctaccaataattaatatacgttgtttcataacaatcccctttgaatatgtttgaatgtttacattaaatgtataaatacggtaatttcataaaattgtaaattgttaattaagaaatttcaataattaattactttatacttgagaatattattattttttacgataatgatattgaaagtttattaaaggagtgaaaggcataatgaataaagaacaattagaaaaagtaagtcatgggaaaggattcatcgctgcattagaccaaagtggtggtagtactccaaaagcattaaaagaatatggtgtaaacgaagatcaatacagcaatgatgacgaaatgttccaacttgtacatgatatgcgtacacgtgttgtcacttcaccttcatttacttcagataaaattttaggtgcgattctatttgaacaaactatggatcgtgaagttgaaggtaaatatactggtgactacttagctgataaaggtgtcgttcctttcttaaaagtcgacaaaggtttagctgaagagcaaaatggtgtccaattaatgaaacctatcgacaacttagatgaaactttagaccgtgcagttgaacgtcatatcttcggtactaaaatgcgttctaacatcttagaattaaatgaacaaggtatcaaagacgttgttgaacaacaatttgaaattgctaaaaaaatcattgctaaaggtttagtacctatcattgaacctgaagtaaacattaacgctaaagacaaagctgaaatcgaagaagtattaaaagctgaacttaaaaaaggcttagattctttaaatgatgatcaattagtaatgctaaaattaactatccctactaaagctaacttatacaaagaattagctgatcatccaaatgttgttcgtgttgttgtattatctggtggctacagcagagacgaagcaaacaaattattaaaagacaatgatgaattaattgcaagcttctcacgtgcattagcaagtgatttacgtgcaggccaatcaaaagaagaatttgataaagctttaggcgatgcagtagattcaatctacgatgcttcagtaaataaaaattaatagtcagatttttatttaaaagtgatgagtcacgtgctcatcacttttttcatgtttttaagcagttataaccattaaatttatttaataaaaaaactgttaacagaacgtgatgtcctgttaacagttttctaatttttcttatttagcattagtattttcatagaaacctaattctaattgtttagatgttaaacgacgagtttttctcattaagtcaacatcatgaattaatgattcaccatatgaaggaatcatttttttgatttttggtttccattcatctaaatattgttcgaagtttctttcgataacttctaacgctactgaaactgatgtagaagcccctggtgattcaccaagtaaagcaatgatagagtggtctttagagtcaaccacttctgtaccgaattggatgaatcctttaccttctttttcatcatctttaataacttgtacacgtgtaccagcagtatatacttgccaatcttcatcacgagcttcagggtagaacgtacgtaagtggttcatacaaccttctttagtcatgatgatttggtcaaatgaatatttaagtaatgacatattcttaactgctgcagctaataacgtagtgatattgtgtggtttaactgatttgaataaatctaagttagaaccgtgaattaagaatttagggccaacatttgcgaatggtccgaataataatgttctttcaccatcgatataacgagtatctaagtgaggaacagtcattggtggtgtgccaggtggctctttaccataaactttcgcatcatgttgttcgataacttctggatttgtacaagcgataaattgaccaatgattgggaaaccaccgatatgtttaccttcttcgataccagttttttgtaataatggaatagatccaccaccagcaccgatgaatacatggtcagcttctttagtaaagactttattgttagctaaatctttaattttaacttgccatttaccgttagataaacgtttgaagtcttgtacttcatgattatagttgacgtttacgtttgaatcgtcgttttgtaagttatgtgccattttacgagttaattcaccgtagttaacgtcagtaccttcgtcgattttactagcagccattaagccatcatcgaaacgaccttgcatcattaatggaatccattttctcattacttcgatgtcttcagtgtattcgatatcatcgaacatagggaaatctttcattttttcgtaacgttcttttaagaattgaacgttgtttttaccacgtacgaaactgatatgtggtaaaggatgaatgaaatctctaggatctttaatttgtcctgattctactaaatgaccccaaaattgtttagaaatttcaaattgttcgttaatttcttttgctttttcaatgtcaatcgtaccatctggttgtcttacagtatagtttaattcacataatgcagcgtgaccagtaccagcattgttacgttcatttgaactttcgatacctggacgatctaaacgttcataaagatcgatgttccagttaggtacaagttcattgaacatagatgcaactgttgtactaattacaccagcaccgacaataatcatatcttttgattctgtcatgtttgtacacctctccaaaaattatgtttcacaatatattataattacctgttgctcttgtttccctaatatctagtaatcaatatattgttttagtaatgtgttaagtctttcattactatgttaaaacaaatatagtcaattgtaaatcagaaaaacttaaatattcgaattaatgaattcattataattaaattaagcaaaaaatttatcaatataagttaaatagtaagaatagttgaatgatcaaagttttattataacatgatgtcattacaatcacttaatgatttacttacaaccttatataatgattatttattattttgtaaaaacttttcaatataaaaagctgattcttcaattgatttatactcagtattaatcactgtagcatttaattttttaaatacttcttctgcataactgagttcttcttttatacgatttaaattattatattgagactctttcgacaaacctaatgtttcagcacgactttttcgtatatttgcaatatactgtggacttgcagttaatccaaatacttgtaaccctttttgcttaaaaacactgtctggaatactaacttcaggtactaaaggaatgtttgctattttgtagcctttattcgctaaatacatacttaatggtgtctttgaagtacgtgatacccctacaatcaacgcatccgcttcgcctatatcagaaaaatgcttaccatcatcatatttaactgaatattcaatcgcttcaatacgcttaaaataagcttcatttaactttcttaacgcaccactttccatcaatggtttttcacctgtcacgtgttcaataatgctaattaaatcagacatataatctacatatgggatatgatgttctctagcaaattcgtgaccaagtgcattaaatgattcacttactaatgtcgtagctactattgcgtggtgttctttcgctaaatttaatatatttaaaaattcttcctcatctttaatataaggaaatttttttatttctacattatttaaatctggaaactgggttaaagttgcatgaatcatacgttgagcagtttctccaattgaatctgaaacaataaataattttaaattatgtgcttgtgactcgacttcattcatttttgattactcactttcctccacttgactctgagcagtcgctaaaattgctcctggaattcggaatggtgaacatgatacataatcaattggtaagtgattgaaataatgaatagattttgcatctccacctaattcaccacatacaccaatcttaatattttcgttcactttctttgcctgtttaactgccatttcaattagttttccaacgccatcttcatctaatgtttggaacgggtcaagtttcaatatatttctttcagtatacacatttataaacttccctgcatcatctctagaaaaaccaaatgacaattgtgttaaatcgttcgtaccaaagctgaagaaatcacaatattttgctaattcgtctgaaataagacatgcacgaggcgtttcgatcattgttcccattgagtaatctacgctttcttgatgttgtttttctaattgatcaatagtcttaacaaggttttcttttaaagtagtaaattcttcgactgtagacactaacggaatcataatttctggtttacactgaatgccttcttcttttaatttaaatacactttcaataatcgcttctacttgcatttcatataactcagggtatgtgatggctaaacgacaaccacgatgtccaagcattggattcacttcgtttaaatccacaatgcgtttatctaatgtttcctttgaaatatttaattgcttcgcaacattcgcaatatcctcttcagaatgtggtaagaactcatgcaatggcggatcaagtaaacgtactattgtaggatgttcacctgataatttaaaaatttctttaaagtcttctacttgatattgtttaatatgattaagtgcttcgagacggtcttcacgagaggatgataagatgaaacgtctcatctctactagtcgctcagccccaaagaacatatgctctgtacgtactaatccgatgcctttagcaccaaattggtaacccactttaatatcttgaggtgtttctgcattcatacgtacttttaaacgagctgtcttttctgaccactccataaattgattgaatgactcgctatgctcagcattgactgttttaatctcacctaaataaatgtcaccttctgaaccatcaactgaaaccatatctccttcatgtagtgtttgattgccatagtataccgtcttagcactcgtattaatttctaaatcagaacatcctgtcacacaacatttacccattccacgagctacaactgctgcatgagacgtcatgccaccatgtgtggttacaatcgcttcacttgcaatcataccttcaatatcttcaggagacgtttctggtctcatcaagatcacttttttaccttgatctgattgtgctttcgcctcttcagcagtaaatacaatttgacctgttgcagcacctggactcgcaggtaatcccattttagatacaactgttgcttcttttaatgaagactcatcgaaattaggatgcaacagttgatcaattgattttacttcaacttttttcattgcttcttttttagtaataataccttcattcactaaatctacagcaatttgaatagctgcacgtgctgtacgtttaccattacgagtttggagtaaatataattgtccattttcaattgtaaattcaatatcttgcatatctttatagtgtttttctaattgttttgtcacatctacaaatgcttgatgaacctctggcatttgatcatgtaatgttgagatatctttaggtgtacgaataccagcaacaacatcttctccttgtgcattaagtaaatattcaccaaataatttattttcgccagtcactggattacgcgtaaaagcaacacctgttccactattatctccactattaccgaaaaccatttcttggatatttactgctgtgccgatgtcatgtggaatatcatttaaatctcggtaaatacgagcacgatcattatcccaagatttaaatacagcttctatagcttcttccagttgtttcaaaggctcttgtgggaaaggtttatgtacttcttctacatatatttccttaaagcgcttacaaatttcttttaaaccctctgcactaatggcagcgtcattctcaaaatgatgttgttttttatactgttcgaaatatgtatcaaatgcttgcataggtacactatatacgacttcaccaaacatttgtaataaacgacgataacagtcataagcaaaacgtttatccccagtttttttagctaatttttctacattctcatcatttaagcccaagtttaatattgtatccatcattcctggcatagaaatttttgcaccacttcttacagaaacaagtaataaattagtatcagaagagaatatttttccggttctctctgaaaatgaagccaagtgatcaattaattctgttttgatgtcagtagataatgacttaccttgttttaaatactcaatacatgctgttgtggtaatggtgaaaccatctggtacaggtaaacctaagcgtttcatttcagatagattagctcctttacctcccaatacatctctcattgatttttgtccttcatcaaacgcataaatatatttagtcattataaatcacctcaaatttttattatgtcatactaattatttaaaagtatgtcataataacacgtgaaatacaattaaaattatctttatttttaatttttctaaatatagacaaattttcaatattcatgttatctgatacatcagtattctcatcataaaaaaacactgataaattagtgacatactaatttatcagtgtggtgaatatgattatttattttgagcgttgttatattttgtgcgttcagcatcgcgtaattcaacacgacgaattttgccagagtttgtttttggtaaatcttttacaaattcaatcgcacgtggatatttatatggtgcgactacttttttagagaaagtttgtaactctttcactaaatcatcacttggtttatagccctcttttaaaataataaatgctttaacaatattgccacgaattggatgtggacttgctacaactgcacattcttttaccgcttcatgatttgtgagtgcatcttcaacttcgaaaggtccaatagtataaccagaactaataataatatcgtcacggcgaccttcaaaccagaaatagccatcttcgtcgatatgtgctaaatctccagtaatgtaatactctcctgcatgtgcctcttttgtacgtttctcatctttaaagtaacctttaaataatccagggaaatcaagtggtaatgctatattaccttttacatttgtatccactttgtttccatcatcatcaacaactgctacacgactacccggaatagctttacccatagaaccaggacgtggttctgtatcttttaagaaaccaattagtaacgtactttctgtttgtccatatccgtcacgcactgttaaattaaaatgtttacggaattgttcaactacttctctatttaatggttcccctgcagatactgcactgtgtaaatgatctaaattgtattgatctaagttatctaattttgccatcatacggtattctgttggtgtacagcaaagcacattaattttaaagttttgtaatagtgataaataacgggaaggattaaatttaccattatacacaaatgctgtcgctcctgatcccataatagataggaatggactccatacccatttttgccaaccaggtgcagctgttgcccacactaagtcatcttcttttatagctaaccaatgttcaggtgccattttcatatgagcatatccccaaccatgagaatgtgtaacagcttttggattacctgtagttccagaagtgtaagataaaatagcaacatcatctcttgttgtattggctatgtctaatttatcactttgctttgctttttcatcttcaatactaatccaattctcttgatttccgttaatcacaaattttgttaattcgttatattcttcaatatctctaaattcttctataaaatcagctaatacaataactgcattaatttctccatgcgtaatacgatattgtaaatcctttgttcttaacatttcagaacttgggataattgcaatacctaattttaatgctgcaatataaagttcatacgtgatgatagcacgtggcatcatgattaacactttatcgcctttttttagtccatggtttaataatacatgtcctactttattagcgtttttaattaattcagagtatgtaacactaatgggttcttctacaccgttttcataaataattgcttgtttactttgatttgaagcatgtttttctatttcagatacaatattatatgtctctggtgctaataaatttaaatgattcattactttattttccttccaatttttaagttttcatcgttcataaaatcacacatcttaatttcacgcaatcctatgcggtatttgttttaaatataaaaaagattaagtttctataccagtatattacttttttagaaacttaatctttgaatattaaatatattatctatatcaacattcgtttctaaattagcaagttctattcttacattataagataaatcgcgattaactattttattatcgacaccttgtttagtgcctctttttttatgcgttttatcataagcggctgaactttgccaatcatagaacgattgtcgatctttccataacgtcaaaataatataatgacgatgcttagtttgaggacgtaaaaaacgtaaagctttgaatcctggcacatcttgtaaatatttagtgcgctctaaaaatttagattcaaattgaggttcattaccttcattaacaaacaagtgattcaaaacacatattgaatcgtttgttaactcgtttattgactcaagtactgtatataattgaacatcattatttttttcgatagacatagtccgttcttctttttcttctattacatatgttttataactatcagttaaagtcacttcttagttccttcatttcttaactagctttaagctatcatttttaattctgctattcatctctatcttccttcatataatgaaagggaacgtttaacaatttctaagaattcatgatccaacatcgacgtcttagaaaagtaatcaagtatattttcagcaagatattcatgttttggaaaattttggtcttgatttatccatgatgcaagttcacctaatggggtcttatcatcaataaatccttgcataaaatcataaaaactcatcaactcaccccaatatctagatataggataatactatcatgacaaattctttaatactagagtatacacttaacttctactttaaaaatgtagaattattgcttaaatatatattttgactgcttattcaatagttaaatagtttaatactactgcacctactgcttctgctgcaactaacatacttgactcatcaatcgtaaatttaggatgatgatgtggatatgctttaccctctctcggttttgctccagaatatataaaagtacttggcaatgttttagcataaaaagcgaagtcttcagatggcggttgaggttcgcatacttctatgcctttaacatcagctaattttgcttggttaatggtttctgcaacatattcagtaaagtcaggatcattatacaatgcaggataatctttactaaatgtaaattcacaatttacaccaaatgtttcttccaaaccatgaaccatttgttttaaagccgtttcaatacgatcgcgtgtagcatctgtcaaagcgcgaacgtcaccttcaatggttattttatctttaatcacattaaattgacctttaccatcaaatgatccaattgtgacgacacccgtttcaaatggattaaggcgacgtgagaccactgtttgagcggtagtaacgaaattagctcccgctacaatcgcatcatttgcagtatgcggagaagaaccatgtcctccttcaccttttacaattaatttaaagtaagaacgtcctgtttgaacgttacccttatgataatagactttaccaggagccatattagtcatcacatgggtgcctaaaacatgatcaacgccatccaatacgccatcttcaatcatacctttagctccaccaggtggcatttcttcagcgggttgatgaataacaattactttgccactgaactgagatttcatttctatcaatgtttctgccaaaataagcatatatgctgtatgtgcatcatgtccacacgcatgcatgactccctcgtttttagaagcaaatgataaaccagtatcttcttgaatgggaagcgcatcaaaatctgctcgaatagcaatcgttttcccaggtttaccactatctatcgttacttttacaccattttgtcctatatttgtttctaccttacactctttatctttataaaaattagcaatatatttgggtgtctcagtttcatgaaatgataactcaggatattcatgtaaatgtcttcgaatctcgatcatacgcttttccttatcttgtaaacgttgcactaaatctttaatcatttcatatcactccttctctgtcattcattatatgcctttacgtattaaaaatgttgtagaaggggatatttaaaataaaaaggttagaatcatctttgattccaacccttatttcatataactatcttattaatgtttatagtatggatcgaattccattgctccagcattctcgtcactaacaccatgtttatagtaatcaacatattgtggttctaatggttttttaccacgaatgatatcagctgctttttcagcgagcattaaaactggtgcatgaatattaccattagtagtgcgaggcatagcagatgcatcaacgacacgtaaattttccatgccatgtactttcatagttaatggatctacaactgccattggatctgacgctggccccattttagcactacaagaaggatgtaaagcagtttcgccatctttacgtacccaatcaagaatttcttcatctgtttgtacagatggtcctggtgagatttcaccaccattatatggatccatcgcaggttgagataaaatattacgtgctactcgaattgcttcaacccattcttgtttatcttcttttgttgataaataattgaatacaatacttggtttttcaaatggatcttttgatttaatttttaaactaccacgtgaatttgaatacataggaccaacatgtacttgatatccatgcgccaccggtgctttttgaccatcatatcttacagcaattggtaagaaatggaacattaaatttggatatgcaacttgattgttagatctaacaaaagcaccaccttcaaagtggtttgaagctgctgcacctttacgtgcaaatatccattgtaatccaatccaaggcatacgttttacatctaagcttggttgtagtgaaacaggctgcttacatttatgttgaatatatacttctaaatggtcttcgaagttttctccaacaccaggtaagtgcatgcgtggttctatacctttagattttaagaattcagaatcaccgataccagacaattgcaataactgaggtgtattaaatgcaccacctgaaagaattacttcaccggcattcacagtatgaagcttaccattacgtttaaacgttacacctgtagctttcttaccttcaaaatgtattttagtaacaaatgcacgtgttttaactgttaaatttttacgcttcattgcaggacgtaaataggcacgtgaagctgaaacacgacggccattatgtacttgactatcaaatggaccaaagccttcttgtctatatccattgacgtcgtttgttttatgataacctgcttcaacacctgcatcgaagaatgatttaaataatggatttgtggctggtccacgttttaatttaatcggaccgtcatgtcctctatatttatcatatggtgcagctccaaatgttttttctagttttttaaaataaggtaaacaatgtgcaaagtcccaagtttccattccttctggttcagcccagccttcataatccattggattaccacgttgataaatcataccattaattgaacttgaaccacctaatactttacctcgagcatggtctaccttacgtcccatatgcggttcttcttcagtttggtatctccaatcgtaaaatggatttcctgaaggaaacatcaatgctgcaggcatttgtataaataaatcccatggataatcactacgtcctgcttctagtacaagtacttctttatttttatcttctgacaaacgatttcccaatactgatccagcgcttcctccgccaataattacgtaatcatatgattgatttttactcatatattgtcgtcctcctataaaaatataaatcttctatttaaatacaatttagtttgatttgatacgtctttattcttcaaaacaaatggaccgtaaaataatacgtctacggtcctttatagttaaattgtaaaagttatttactaaagaaatttacaggttctggatttctatttgtaagaatatgtttagagattaagtattcttctaatccttctttacctaactcacgtccaataccagattgtttataaccaccccatggcgcttgagcgaagtaaggatggaagtcattaatccaaactgtgcctagttttaatttattagctacacgttgtgcttttcctatatctttagaaaatactgcacctgctaaaccataaattgaatcatttgcgagtgcaatcgcttcttcttcattatcgaacccttctactgtaacaacaggaccaaatacttcttcttgaacaattctcatatgagtatcgcaattagtgattacagttggttcaaagaataaaccatcttttaaatcttcatcgtctggacgtttcccaccgatagcaattgttgcaccatcatctttagcaactttcatatatttttcaattttatctctatgttctggagaaatcactggacccatttctgtgtcactatcaaacccattacctaatttaatttttccaacacgttcaattaaagctttttcaaatttttcttttatattgttatgaactaaaattcttgaacctgctgaacaaacttgacctgcatggaaatatccgccatttaatgcttgatctacagctaattcaaaatcagcatcatcaaaaataatatttggattctttccgccaagctctaatgcaatattagttacatgatttgcagcattcttcataatgtgtttaccagtttcaattccacctgtaaatgatactaaatcaacttctttatgacctgataatgtatctcctacttcttcaccactacttaatattaggttgataacccctttagggaatccaacctcttccattaattcaaatacacgaattgttgttaatggcgtaatttcacttggtttcattactaatgagcaaccagttgctaatgcaggtgcaattttccatgaagcttgtaataatggataattccaaggcgtaatttgtgtaactacacctacaggttctttaacaagtttactttcagtgttaggtattggagaatcaataatttctcctccgtctttatccgccaaacctgcaaaataattaaacacatttgcaatatcatccatatctgcataagattcctctaatgtcttaccagtatctagtgtttctaatttggctaattcatcacgattttctgtaattttatcagcaattgctcttacttttttacctctgacttcacttgtttcttgtgaccactcaccattttcaaatgaacgacgtgctgctaaaatagcttgctctgcatcttccttagtaccttcagtaacagtgaaaatcacttcttgattatatggattaataatatctctagtatttttgttagcgctctctacccattcaccatcgatatattggcgattagacaatgcttttacaagttccatcatactacctccgttaagtttgttaaatttttatttaacgaattttacaaaagtagcttatcatattttttacgtcattgcaaaaagcatctttatatatttttttatattattttaaatattatggaaattaaaattgacttttgaaactcataagaaaaaatcatataatgagtgagaatgtaaaatttgtgttaatatttcacatcttatgaagatcaaaataagtgaggtgcaatatgagcaattctaataatatcaatcaaaaaatagaggaagcgaaagatttagttatcaactcaattggtgaaacaatggatttatatggtacaaaccgtagtgttggtaatctttacggtacgatggtttttgaaggcagtatgacgcttgatgaaatgcgtgaacatttacaaatgagcaaacctagtatgagtgctggtgtaaaaaaattgcaagaatacgatatcgttaagcaacaatttacccgtggcagtcgcaaacaacattttatagctgagaaagatttctttaatttttttcgaaactttttcacacaaaaatgggaacgtgaagtcgatacaaatttagaagcaacgaaaaaagcagaaaacattcttcaaaacataatacaaactaataatttaagtggagaagaaaaagaaaaaatagatcgtatacaatcccaactgaaccacacaaaattatattgtaaatggttagaaaatttaagctctgcgattgaatctggagacattttcgaacattatcctataccaaaagaagaagagttataacttaattcattatcaatattattcaaaaatcctcagaaattagatttattatctaatttctgaggatttttaaatgtactatcattttttacattataaattatcgtcttcagggtctgatttaacttgaacaatacgaagtgaacggcgctctacttcttttagtttatctgctcttgtttccagtttaatccgatctttattaagtgtgataataaaggatatcatcataaacgtaaatataaatagaaggggtacacttgctaataatgaagcagtctttaatacttcaagagctcgttctccaccaactaacataagggagaaaggtaatagacataaagcaaaagcccagaataaacgattagcttttaatggttcccctattaccttcttctgagaagcagccgctaaaatataagaacctgaatcaaatgtcgttgctaagaataaaaatgcagatattaagaacaacactataattaaagaaccaaatggcaattgatgcataacttctataattgttgcttcagtactatgtttatttaaaaaatcaaccacattaaactgtccactaatttgtaaataaacagcataattaccaaaaattccaaagaataagacacatcccaatgtaccataagcaattgttcctaatatgacttctttgagacgacgaccttttgaaattcgagcaataaataaaccaataaatggtgcatatacaagccaccatgaccaataaaatatagtccaatcttgagggaaatttgtttcattacggtttctaattccaccaaatggctccatccaagttgccatatggaagaaatctcgcatcatattcccaaaaccagttaaagttgtttccataataaagattgttggacctacaataaatacaaatgcaagtaataagaatgataaccatacgttaatatcacttaatttttgtattccttttttcaaaccagtataagaactaattgcaaaaatgactgtgattgtgaaaagtataattgagcgaataaccatattgtctccatctatacctgttaatcgttcaattccagaagaaattaatggcacacctaatgctaaagaggttgccgctcctcctaatagtccaaatataaataagatatctactaatttacctaaaaacttatcagtttgtcctttcaatactggacgacaggcttgactaattttatatactggttgtttctttacaaatactaaatagccaataggcaaagctggtaatacataaatcgcccatgcaataggtccccaatggaacataccatattgcgttgcatatgtaagagcctcatcagtcattcctttagcaccatttggaggtacctgataatagaaggcccattcgataacaccccaataaagaatatctgaaccaatacctgcacaaaatagcattgcagcccaactaaaattattgaattcaggtttatcacttgcttttcctaaagtcacattaccatatcggccgaaagcaatatagagtacaaaggataaaacggctaaacctataaataagtaaacagatcctatcgagttagaaatagcactatttatatcagtaataactttctcacttgcacttggaaagaccatcataggtataactgctgaaagcaagacaataacagtacctataaaggtgggccaatccattattttttcttttttcaactaagatcctcctttgaatattatatgtacgacttatattttatttacgtgaatgattcacatgatgacaatatctaaaattaaataaaaatgcaaattacattcataaaattattttagaaaactgaatatttatatattttattccattgaaactatcgaaaaaaattaactatatcaacattgttaaattaaaaataaacgttttgaacaaataataaattataaacattgaatttttattcatttttaatgaatatatatttttttgaaattctctgttttaaaataaaaataagagaagaatacaattcttctcttcaatattcaaaaaggcacaaaaggccttctcaatctattaaattgtcatgaaactttaaatcgtttatattacaaatactctattataaactaatatcctaatattatttttattataaaaccaacaataactgaaacacctattgcaaagaatcctggaataataaagcttgtaggtcgtgtacgtcctgtttcatctaaattaactgcaaataataacgttggttgcgcaggtataacaaagttaacatttaatgtttgtaccattgctacaaaatacatgggtggaattcccatactcatgacgatgggtaccataatcgatgctgttgctgtttgtgaaataacaatcatcgctactacagctacaagaataatcacaagccagggcatattttgaatcgttttgccaacatcattttgtatgatatgtaaattatgaggtgcgttaaatactgtcgcacctaaccaaccaggtccgagtactgcaaataatgcaccaatagcagattgtgtaatatttgaagatagaatatcactcgtattcactttcaacatcaataaattaattgctgcacttaaatacataaagaattgtacaatctctgtcattgatacagtgacatcttttccattgacattaaatgaaggcatgaattgaggaaaaataccaaacgtaagaataccaaacacacacaaaataaatgctaaaacacctatctttactctagtagaaaaagcatgatttacatcaacgtcaggtgtatgagcaatttcactttcagtaattgtatttttacgtcctacaaacgtacaaaatatacttaacataaacatagtgattaatgatgtaggtaagacaatactcaaatattgacccattgaaatttcatgacctgcaagtactgaaataacgtaggctgttgcagatgcagctggactacaaagtaaagccaaattagcagttagtactgaagcaatcagtggtcgcttaggttggattttagcttttactgcggtttgagcaataataggttctagtgataaagcaatatttgcagtccctactccaaatacgaagacaaatacaatcataggcgcaataaaaataattgattttggaaatcgttcaatgattttcgaagcaagatagacaagataatcaattccgcctgtagcttgtagcgttcctccagctataccaattgccagaataattagtactgctgtaacaggggcagaaccaggaggaagttgaaatccaaatatcataatcagttgggccacaatagcaaaaataccacagcctaaagcacctgctgtgcgcaatcctagcataatggctacaatcattatgataatttctactataaacagtagcattataataactcctaactttaaatagttcatgtgaattttttaacatatatattttatcacttttatttgttaaaagtatataattgcataaagttaattaatataaatattttgataagaaaaaacctttaaaaatcaaaaggattcttaaaggtttatcaatatttattgttttttataatcttctttgagtgatgcacgaccttcttcatcatatactacgtcatcatcggtatgcccttttgccattttaagatttttctcaatacgtgcttcttcttcttttttagaacgacttctataaaagcgttcctcaaaaagtgaaccccaaatgagaccaaatatgacgccaatcgtaattaccacaattgcgatcactaggatccattgaagtactcctaacgccattgtgaatcaccacctttatatttgaacactataggaattagtagttatatatttccctttataaagtgatttaaatcatattaaatgtaatttttaaaaataaaaaagagcaagttagaattcgttttgaattcatatacttgctcttttaaacatcttagtcattattttaaaccaattttttaatagttcatttccttaaattatgaaatgtaattgtatgaacttgcttgacttgctgaaattgtacgtgtagatactacacctacgccttgatagttcatttcagatactgtaacagaaccatcactatttacactttcaacatatgcaacgtgaccataaccaccttgagtcgtttgcattacagcacctgctttaggtgtattgtttacagtataaccagattgcgctgctgcgttagcccagttatttgcatttccccaagtattaccaattgtgccaccaactttgtcatatacataatatgtacattgaccccaagtatagtaattcgcacctgaatttgttttacctgagaatgcttgagttgaagcagttgattgtgttcttggtgcactttgagttgtaacttttacattactatctgatgttgacgcagtgttagcgcctaaaccacctgtcgtattattagttgtataagattgattgttgttagtagatgtttggttattatttgttgtatatgaataattactattgtaattatagctattattattgtaattattatagctagattgactattatttgaatcattagtgtgatttaaacgatcaggactccaattaccttgccatgtgtaatgatagttaccttgttgatcaattgtataagagtagctatatgaagttgggtcattagggttatatccattattttccgctgcatgtgcgtcatgatgcgcaaatccaactgtagcgattccggctgtggcgatagttactgtagcgatttttttcataattaaatatcctcctagaattttaaaacattcttcttttatttatcacgtggctactttcaaatgacatctcaatattaaattacttcgaattattttttctcgttaattaacgacaagacatactttatcagataaacaagcgtttgtgggcgttgttaataccttgtaattgaatcataataatacgacggtttttgtaattaaatctctcttttgttacatcatcaaaacactttaatatcaatctttttatcaatttaatcaacagtgtcattacaaatgatgtaatatatctgattattttaaatatgttttatttcataacataggggaatattatttattattttcaagaatgtatagcaaaaaacgagtgagataacattcattttgaattcgttatctcactcgtttggttattcattaaatatattggtgttcttttaagtaattaagaatatgttcaactgattcatctatactttgtgtttcagtattaatagttatttcaggatgttttggcgcttcataaggtgcactaattcctgtaaattctttaatttcacctgaacgtgctttttcatataaacctttagggtctcgtttctcacattcttctacactacactccgtatatacttcaatgaattctccgtcttctagaatgtcacgtacttcatcacgatcttctctatatggagaaataaatgcagtaattgcaattgttcctgcatctacaagcaatttacttacttcaccgatacgacgaatattttctttacggtcttttggactaaaacctaagtttttatttaaaccgtgacggacattatcgccatctaatcgatatgaatgtttaccttcttcaaataaagccttttcaagtgccacagagattgttgacttaccagaaccagataaacctgtaaaccaaatgacagcacttttatgatcattttgacgttgtctatcttctttagttacttctgaatcatgccatgtaatatttgttgattgactcattttatatactcccccaaattacttttgtcttaatcctttaattaatacttctgcaacttcaggtcttgagaattcttttggtaatgattcgccattacgtaatttttctcttactttcgtaccacttaaatgtacatggtctgatgcatcatgtggacacgttttagctgtagccatattgccacatttttcgcagtaaaatgcatgttcaaattttaaaatatgaatatctaattcatcttcaaattgagagataagctcttgtgcttcataagtcccataataatcaccaacacctgcgtgatcacgtccaacaataaaatgtgtacaaccataatttttacgaactgtagcatgtaaaattgcttcacgtggacctgcataacgcatcgctgcaggatagataactaaacgtgctctatctttaggaaagtaatttttcaagatagcttgataactttccatacgtacatctgcagggatatcatccgctttagtttcgccaactaaaggatttaataataagccatctacaatttctaatgcagatttttgaatatattcatgtgcacggtggacaggattacgtgtttggaatccgactactgttttccaccctaagtctttgaataattgacgtgtttcagcaggatctaaatgataatctgaaaattcatcatgtttaggacgatttactaattgaataggacctgctaaataaacatttcctttttcatatacttttttaacacctggatgggcttcttcagtcgtaccgtagacattttgagcttctttttctttatcatacgtatatttttcttcaagttttaaagtaccataaagtacgccatcttcaccatataaagcaatatcatcaccaatattaagttcattcgcctgtgcctcagtgacaggtaaagtgataggaatactccatactagtccattttcaagatgtgtatcttcaacaacttttttataatccgcttcccccataaatccagtaagtggactaaagccaccaatagctattaattctaaatctgaaattgaccaaggatttaaagttaatgctttaaaagcgttcgctttttcaattaatgcttctctttcttttccttctacaactcgattaattaactctccaccatgtggcttaattgtataattgataatatcttcatttgttggcatcgttgataactccttttctaattattttgattagtttactcggctttatttataagaaaaagacaattttttgttacgaataatagtaataataactaatacaataatcgcacaaataattgcgaatcgaataacatttgtcactgtagtgtcttggatgaaatacgtcattaaagcattactatttgtaaaaataataagaccacctacacaaattgctaaaatattaatgggtaatattttagttaaataggctgaaattggtgcggcaatcataccgcctatacttaatgcaatgacaaaccaccaattaatttgggtaaatcctaaaaagataataaaacttaatgatgttgaaagtgttacaaaaaactcacttgcagacactgtaccaatggcatagcgtggttgaattttacgacttgcaagtaacaacggtgtattgactggtccccagcctccaccaccaatggcatctagaaaaccagcaacggctccttgtggaacaagtttcgcactactaagtgtgcctacgtgtgtatgaatggctttgtgacgtttaaataagaactgatacaaaatataaaaacccattgaaagtaagaatagtgctatataaggtttaatatagtcaccatgtatttgagttaataatgctgcaccgataaatccactgattgatcctggtattgcgagtttcaacatggttggcttatgtacattttcaaatttccaatgtgatgtaccagatgcagcagtcgttgctatttctgaaaagtgtaccgttgctgaaacaatcgcaggtgctatgccgtatgttaataatatggatgatgaggaagcaccgaatcccattccgagtgatccatcaacaagttgtgctaaaaatccagctaatgcaaatataaacaattttctcatatatcacatatcccttcatacctaaacttgcaaatgaagccatcgtgtgaattcttgttgcttaacctcatctaaatactcatcagataaaatatgttgtaataactcctgtttcctagatggctcgattgataatcgtttaattagttgtctactttcatataaaaaatcaatatacatttcatatgattcatcgtacatatcgcttattcttgaaataatttttttattcaatttaggacttgctccattggttgacacgctaatagaaagttttccacgttttaaaatactcggaatcgtaacatttccaacttgggctttcgaagcatgattacacaatgcatgatgaggaacactttctaacacctttgtattgacgtcgttattatttgtggcaatcactacaagatcggcatgttcaacatcttgtggctcaaattctttttgactccaagtgatatttttgttatctaatagttcttttaaagctgttgaaataataggactaacaatatgaacatcagcacaatattcgattaaagttgaagctcgtttcgttgcaactttcccgccacctactatgacaatcgatttctgacttaaatcaatcatgagcggcatatggttcatattgtcgtcctcctatattagatatttttcaaattatggtaatgtcatttcaacatctgatacttgttctttgaaccagctaattttttggcgcatatttacaacatcaccaatcacaatcattgcaggatttttgatttcagatgcacgttgtacaatgctacctaatgttccagtgactgttttttgagaaactgttgtccctaaatgtactagcgctacaggtgtatctactgacttaccatgacgcactaatagttcacaaatttcaggcaaacgttttacacccatataaatacacaatgtttcaggaccatgcgctaaatgttcccaatatgcttctttcgtcatacctggtttattcacagctgtaacaaacgcaactgaggaactataatctctgtgagtaacaggaattcctgcataagcaggagctgcaattcctgatgtaataccaggaacaacttcaaatggaatttgattatccgctaatatctctgcttcttcaccaccacgtccaaaaacgaaaggatcgccaccctttaatcgtgtaatggtatgaccttttttcgctaaattcactaacatacgatttgtttcctcttgtggcaatgaatgcttatttggatctttaccacaatagaagaactttgtgttgggttttgcaaaatctaaaatctctttatttactaagcgatcatataaaatcacatctgacgcttgaatcgctttcataccttttacagttattaaatcaggatcaccaggtcctgcacctacaagataaacctttcccatcttatcaccccgttcgccttctatttctttaaaaatcagctgtgaaaatctctaccatcatgaactttagctactacacccgaacgaataacgaagtcgccaaaatgttcaccttcgagacgtgattttccataatccattaaaattggtcttaagctttcaaggatttccttttcatcgatgttttctttgtatagtttatttaagcgatcaccgttaaagcttccgcctaaatacatattatacttgccaggcgctttaccaataaatgcaatctcagctaatgcaggtcttgcacaaccattaggacaacctgtcatacgtatagtaatctcttcttcactaacaccagcttcatctaataaatcttcaattttagataatagcgttggtaaataacgttctgattcagccattgctaaaccacaagttggaaatgctacacaagccattgaattacgtcttaaaccactataatttttaccatcagttaaaccgtatttatcaataagagattgaatatctgcttttttctcttcagttacgttagcaataattaaattttgatttggagataatctaaaatcaccagtatgtgtttctgcaatttctcttaacgccgtttttaacttatagtcttctgtatcttttacacgtccattttgaatgaataatgtataattccatacacctttttcaccttcaatccaacctaaacgatcgccattatgttcaaatttaaattcacgagcttcactgatttcccagcctagacgtgtatttaattctttaacaatattatctacaccaaaacgatctactgtgtatttaaaacgtgcatttttacgatttgaacgattaccaagatcacgttgaattgtaagtaatgcttcacatacatctatgactttatttttaggaataaatccagcaatgcgtcctacttgagggtatgtatctggattaccatgcgtcatacccatgccgccaccaatagccacattaaatccaacgagttcatcattttctacaattgcaattaaaccaatatcttgtgaaaatacatcaatatcgtttgatggtggtacggcaataccaattttaaatttacgtggtaaatatttttccccgtacattggttctacttcttctttagaatcaagcactttctctccatctaaccaaatttcatgataggcattcgttttaggtaataaatgatcactgatagctgtagcataatcaagtatttctttattaatatttgattgatatggatttgggttacacattgtattacgattgacatccccacatgctgcaatcgtatctaacactgattcattaatttttttcatagatgattttaaatttcgttttaaaataccatgaaattggaatgtttgacgtgttgttaatttcaatgtatgattcgcataattattagaaatatcatccattgcaatccattgttcaggtgttgctttacctccaggtagtcgcacacgaatcatgaaagcatatgcaggttctaatttttgtttacgacgttcatcacgtacgtctcggtcatcttgttgataactcccatgaaacttaagtaatttggtatcatcatcagaaatagcaccagttaaaggatctgctaaaccttcttcaatcgtaccgcgtaaataattactttcagtttttaaatgttctaacgcatcaaggttttcatttaactcatcagcaatttgtttaatcgttttagccattcactctccaccctttctttagtacacgtcacgttgataacgtttatcttttttcatttgttttaagtagctttcagcatcttcttcagttaaattttgttctttcactaatacattgcgaatagcttgatgtacatctttagccatatttttttcatcaccacaaatatagatagatgcacctttttctaaccactcattaaattctttactatgttcagcaatgcgatgttgtacatatactttttgatctgtatcacgggagaaagcgacattcattttttcaagaacaccatcttttaaccattcttgccattctgtttgatataagaaatcagtagtaaagtgttgatcgccgaagaataaccacgtattacctttataaccatattcttcacgttcttgcatatgtgctctaaatggcgcaattcctgtaccaggtcctatcataataacaggcgtatctccatctttagggaatttaaagtttggattacgtttaagataaattggaacagtatctcctggttgaatacgttcagcaaattgaacggaacatacacctgaacgatctctaccgtgtgtattatatcttactgcaccaaccgtaatgtgaacttcatcaggtaatgattgataactacttgatatagaatattctctaggaggtaattttctaaggatttgatataaatcttcaggttctaattcttcaggtgggaaatcattgagtaaatcaataaaatctctaccttcaatataattttgtatccactcactatcttgaactttgtcttctaacgcttcattatcaaaatatgctgctgcattttgaagtaatggtctcgttaattttgtaatttcaaagtaagatgttaatgcttcttctaaagaaatcgtatctccatcttctgagatttcaatttgatctcccggatcccatcctaatgtactcatcagtaattcaactaaagctggatcattttgtggtaaaacgactaagcaatctcctacttcatattcttcaccaaaattatctaataagaattcaatatgacgtgtttctttattagatcctctaccatttaaattaatattttctaatacttcagcttggtatggattcgcttttgagtattttttctctttcgcagatttaattgattcacttacaacttgttcactttgtgtaccttcaggtgctgagtcaatagtattaatgacattagccatccatttttcggcatcttcttcataatccacatcacaatcaacacgttcatataatcgttcggcaccaagttcttcaagttttttatcaaaatctttacctgtttgacagaagaactcataagtttggtcacctaatgcaagtactgaaaatcttactccctctaatttaggggcttttctaccatgaataaattcatgtaattcggctgcattatccggtggatctccttcaccttgtgtggaagtaataataaataaatcttcaacatttttaagatttttaggtttaaattcatccatggcttttaacgttacattatgtccaatatttgaaagacgttcttcaaatatttctgctaaaccttgtgcatttcctgtttctgaaccatataataatgtaatcgctcgtttttcaggttgaattgttggttcattttgttgaagcattgtttcagtatcctttgaaacagctcctatttgtgaaccttgtgtgtcagatgttcctgatgtaagttgttgatttgcgactaaatagccacttaaccatactttttgttctggtgtaagtgtctgtaataattcattaatttgtgtggcttgtccttcagtaaaaggactattggtaacacttagattcaattcatccacctctatcatttcaatctttattttattttaaaatacttactatctctatattatgtaatctatattcgactttccagtaaaaatcgaatatagaatatttttaaatccttatcagaatactatgttttttgtataaaattttttaaaccttacatcacggtttatctgcaacatgaagtccacattctgttttttcaaaacttgaccaacgtcctgctctggaatcatctgaattgaatactggcgctgtacaaggaatacaaccaatacttggataatgctggtcatgcagttcattataaggtaaatcgtgctgtttaatataatcccaaacgtcatcttccgtccaataaattaaaggacatactttaatcgatttaaaacgttcatctttattaatgaaatttgttttagcacgagtcggagattgatctcttcgtagtcccgaaatccaggcaatcgccccacctagtacctcttctaaaggtttaattttacgaatataacaacattgatttggattatttttccataatgcaggattgtatttctcagcttgttcttcaagcgtcaattctggtttcttcatttcaatacgtaacttaggaaaacgttcttttactctatcaattaaatcgtatgtttcttgaaaatgtaaatctgtatctaaaaatacaatttgagcatctggtttaatttgataaatcaaattaataagtaccatgctctctgccccaaaactacatgagtaaacgatatcttcaccatacgtagtataagcccattttaaaatttcataggcaccctttgtcgcgtcgtcagtagaaatggagtcaataaatggatcaccatcaaaactctcatacgttatctttgatactgacataaacctatggtccctcctcagtatttacaaatttattaatctaatacctatcagaattgtcagaataatatgctaatactttaacgagtttcatatagaaagtcaagtggaagtaaaatatattctattcctataaattcactcataagccttctgaaaattttaaatatattacttttaaaaatatacaaaatcaaaaatattgttgtttaatctttattttatataaaaaaatattaaaaaaatgtaattttttagtgacacaacatttttttatgttatattaaattgtaattagtaatatattctttgctattcatcataagttctagttgtttttatttttttacaatttataatcattttgcatagaattagttactaattaaataatttaaatattttaattaagggagcgtattttatgaataaaaaaacattattttcaattagaaaattaagtgtcggtattgcttcagtagcaattgggggattattattcgtatctgctggtcacgatgcggatgccgcagaatataatacaaatgctgatactaacactgaagctactactgaattattaaattctcacaatgcatctgtagttgaagaaggtgctactaacgctaacactgatcaacctgctacttctgaagatttcttccctaaagctgatgtagttgaagaaggtgctactaatgctaacactgatcaacctgctacttctgaagatttcttccctaaagctgatgtagttgaagaaggtgctactaacgctaacactgatcaacctgctacttctgaagatttcttccctaaagctgatgtagttgaagaaggtgctactaatgctaacactgatcaacctgctacttctgaagatttcttccctaaagctgacgttgttgacgaaggagaaggttatgtagatacttctaaagaagctactcctgatgacttcttccctaaagctgacgttgttgacgaaggagaaggttatgtagatacttctaaagaagctactcctggtgacttctttggtcaaaaagatgatgaaggtaaaactggtgctggttatgtagatactactaaacctgctactcctggtgacatcttcggtcaaaaaaatgatgaaggtaaaactggtgctggctatgtagatactactaaacctgctactcctggtgacatcttcggtcaaaaaaatgatgaaggtaaaactggtgctggctatgtagatactactaaacctgctactcctggtgacatcttcggtcaaaaaaatgatgaaggtaaaactggtgctggctatgtagatactactaaacctgctactcctggtgacatcttcggtcaaaaaaatgatgaaggtaaaactggtgctcactatgtagacaatactacagatgaaacaactactcataccgttgttccaggcgaaactgtagctgaaattgctaaagaaaataatactactgtagatcaaattgttaaagacaatggtcttgtagatgcaaatcacatcgttccgggtcaagaattattagttaatcaccctgtaactaatactgaagacctgactcaaacaactactcataataataatttcactacttctcaagatgttgttgataataaagaattacctgaaactggtagtgaatcaaatgttaattctggtttattaggcggtttagctttagctgctggtgcagtattagttggatttaatagaagaaaagaagaaaaataattttaataaaaaggtgcgaattcctattaaggaatcgcacctttttttaattaattttctcgaactacaaatataagttttattttattcctatttaaataagtacctacttcattattttttcattatttgaatcaactccatctgtaattactaccttttctttaaaactaggattataattaactactaaatctttataattaattaattcataatctatacactctatatgaattttatattttccgactatcctttaatttccttttagttatacttggaaaattatatatccatttacactaatatttattcattatttcaaatgactttaaaaatgttttatataaacttattatattaaaaaaataataatgaagtgtttctcactccattattactaactagttattcttttcataacgtactttttgacggtaaccatatgtgctttctttaattaattgatcattaagcaatcctgcgcctattgctcctgcaacagtagatattgaggttgcaaaccaaggaatacttaaataaagttggatactggctggtccttttaaacctacttgttgtcctaagaatcctggaggtaataacacaagctctgctattaagaataataaatataaaatcatataatatataacaatggctatcaataaagtcatgatggttgttaaattatataacattacaattcttttatgcttagctttttttgtagattcccatagaccatgggagaccattatccaaacgagcatacctaaaattgccatgatggaaattccaaataatcgccatacagaaaaatcaagccccatattccacatggttgaaaaaatcaatccgaatgcgcctgtcgtaaaagcaatcgctacaatattacttaaacttgccatcatattcagtgggttattcgcaaaggtcatcccactgacaagtcgtattattccaagactgcgtgaatttgataaatatcttaaatgattgtttcctgtttcttttaaatgtacttctgttttctcaatacgtgaaaaaggaaattgtttattgatttctttcttaaccctattattgtcatcataacctatatgcgctctttcagaataatgaagttcattaataatggttacgatagcatgtttaaagcgattctttacaggacgccatccaaatgcaggatatgaaaatattgcagcgccattttttttattaatatctaaagcaagtacgttttgatgatagaacataggtaagtctgtaattcctacaacataatcccattctcttttattatgataatcttgaatttttttgaatatttcttccacactttccgcaaaaccagtaagaggatccaccacgagatcaactttccagtcacgttgatgattatcttgttctgataatatattgggtatgtcattaattaaactttgtgctaatttctctgtcactcctggcgccacaacgagaccaattaatttttcttcactcatgttgtttcctcctctctatgatcttgttttttatgttcatcttgttgattatcattattttgtttattggatgcactttcttcaacttgttgatttgatgcatcatgagaagatgattgagcttgttctttttctttcttctcttgttctgcttctttataacgatgatattgtcgatacgaataagtaatctgacggattttctcttcattctctacagtagaccccattgccccagcaagtaaacctagtgaagatacaaaccatactaattttacataatttataaatgtaaaatgaggatgtgcgctggtccattgattaaataaacttggtggaacaaacaatgatacacttatcgctaataaaagatataaaataatataatttaaaagtgtaataataaataatgtgaatacggtagtaaaattataaatatagcgatacacacgctgtgacttagccgttttacgttcaatcaattgatgtgcatagagtaaccagcctgtcatacctaggatagcaataagcataagtataataaatcttattatggagtactgtatactcagctcccaaggcatggagaaaatcgatacataagtcccagttgcaaaagcaactgaaataatctttttgaaattaaaaatatttttccatggttcatttgctcgtgttaaccctaaaataagttgaatccaactgagaataaaccatcgatgaatataacgttgctttggcgtttcatcttcatttggttctactgctttaggatgtataagaggatgaatcttgggagccactcttgaagttgaataatacaattgttcaataatagaagttaaactatttcttaattttcgtcgtaggtctatccaacctaatgaaggtaaagatagcattgctacttgtttatcattattaaaatcactaatcactactttatttccagaaatacttggtaaatctgtaatacatacaacaaaatcccaatcatgtttctctttcatttttgccgctttatcaatactttcatgtacatcttcagctgagccaatcattaaatcaacgtggagctgaaatacccattcttgttgatcattcacacgttgattcagctgttcttttacatctggaataacagcttctacgtgtttatgagatacacccggtgaaggtatcaaaccgattttgtgcattgtgttatcctcctttctttataaatatataaagtaaggtgtacgtcgaaaaagtctactcttttcaaacgtacacctatttataaatgattatttagcaagtacaagtggtgaaaagataatgtaagcaagtactactaaacctagaacaataccgcctgtaatataacgatatttccaaggtgtaagatccactttagctttattagtatttaagtcaaacgtattggaaggtttaaatttattaaagacaagtataatagctaaatcaataaagaacataaaactaaaagtatataaataatttaattgtggcaccataaaactaattgcagcatataacacaatgtgtgtaactaaagctactttagcgcctagtttagatgtgtgcttagaataaaatgcaactaagaccaatgcaagtactggcatactatatacaccattgaactgttgcacaatcgcatataatccacttgggaaaagggcaataagtggagatatacctactacaataatgccaatcacaactgtcgcgatatgaccgacacgtgcaatatgttgatctgaagcacgcttaccaaaaataggtttataaaagtctaaagtaaagagtgttgttgtactgtttaatgatccaacaaatgaacttaatatggctccaaaaataactgctccgaataaaccatagccccaatcaggtaaaatcgcctgaatcaatgtaggataagcattatcattagatgttatacccccattgaaataattatatgcaataacaccaggaatcactgtaaaaataggaccaaataccttgaataaacttaaatatatcgcacctttttgtgcttcttttaaattcttaccagctaaggctttttgtacaatcatttggttcgcacaccaaaagaataaattattaaagaacataccaaagaataatgttggccatggaacaacatctgaatcaatggccccaaaagcgtttagtttttcaggcgtacgttggaccatgtggtcgaatccttttacaaaattcccatcacctaaatgatgtaaacctaaaattgtaataatcaaaccacctataattaatccgacaccatagattgaatcactaaatgcgctcagtgacaaaccaccgataaataaatagataacacctactgcaccaatgacaaatgcaataataatcgttgctgtggcatcacttactcctaagtattccccaatactaaacattttattaaatactaatgaaccagaatataagacaactggtaaaaatgatacaacataagtgaaaataaataatatagaaacgaaacgtttagtaaaggtaccataacgcatttcaagtaattcagaaatggtatccacaccgtaccttaaatattttggtaagaatatccatgcaagtaagacaactgctacagcagctgtgacttcccaagccatcacttccatacccttaccataactttgaccattctgccctacaatttgttctgtagataggttagtcataataatcgttgaggcaatcgtaaatcctgttaaactattgcctcccataaaatagccatctgcactatcagtctttattttttttgaacgccagaacgcataaagactgacccccataacaacggctaaaaataaaataattgctagccaattcataatacgtgtcgctctcctcaatattttatttgcaaaaaataaaaacgttaaatcttcattcaacgttaaactgtttattacttatcctataaagcacctatttagtgtaacttctattttaaccacggtatatctgattttcaatcatataattgaaaattattataaaaataaattatataaatttttatttttatattcaaataaaaaagtaatcaatatattctttaatggaagcgcttgacttctgataatagaaggcataaagtgaaactatagttaaatcatatgcactaggggtgttttaaaactgagatgaggtgtaacctcaaaccctttgaacctgaactagcttatactagcgtaggaaagtgtcgtataaaataagatgacctgttgagatgtgtcaaactgttctcaataatgatagatctattttaatgcaactttcctaatgtgaaggttgcatatttttttgctgtaaatgaagtaaatggaggcacgatctttatgacgagaacagtattagtaacgggaagtagccgtggtttaggtgcggtcattgcaaaaacattagctaaacaaggatttgaagttatcattaattacaatcaaagtcgtgaagcggctgaacaattagcacatgagattggtgaaaatgccattgctttacaagcagatgtcacacaacgtgacgaagtcgatcgtttagttaatgaggcaacacatcattttggaaaaattgacgttgttgtcaataatgcattagttaattttaaatttgatccaaatgcacaaaaggcatttaaagacttatcatgggaagactaccaacaacaaattgatggtacactaaaaggcgcttttaatgttactcaaagtgtcattccacaatttatagagcgtggttctggcaccattgtaagtattggcacaaacttatatcaacatcctgttgtaccatatcatgaatacacaacagctaaagctgggttgattgggttcacacgtaatattgcagccgaattagggcaatatggtattactgctaatgtagtgtcaggaggattgcttaaaacaactgatgctagtgctgtcactacaccagatgtttttgatttaattgcacagacgactccattacgtaaagtgactaccccacaagatgttgctaatatggttgcttatttaagtagcgaagcagcagatggtatgactggtcaaaatattactgtcgatggtggtttaaccatgaattaatatataactggtcttccttatcttagaatagaaataaaatgaacattggagtgagaaattaaattgactcatcaacatcaacttcatctcggtgtattaatctatggatgtggtcatcatcaagctgcttggcaacttcccaattcaagtattgaacgtatcggtgatattcaatactatcaagaattagctcagttatctgaaaaagggttgttagatgtagtctttttcgcagataatcagtcttttatccctagctatacttctatgccaagtttttggtttgatccactgattaacttaactgctatatctcaagtcacacaacatgttggattagttcctaccatttcaagtacattttctaatccattcactgcagcacgtcagttacttagtttagatcatattagtggtggacgagtgggatggaatttagtcacttccatgacagatgccgaagctcaaaatcacagcatggaccatctacctaatcatgataatcgctataagaaggctgaagagtttgctcaagtcatgaacggattgtttgattcttggcatactgaagatttcaaacccaaccgggatcatcatacaatgatcaatcgcaatatcaaaccgcttcaccacaatggcaaatattttcaagttcatggaccattgacaacaccaagtagcattcagggaaaacctgtggccatgcaagcaggtgcatctaaacaaggtattgcattagctacaaaatatgcagatgcagtatattctgtttcttggaatatgaagcaagcaaaacggtatcgcgagcgcttagatagtgaaatggcacaacgtgaccatcagcgttatattaaagtctttcctggactagtcacttatgtaggtcatacacatgaagaagcattgaaaaagaaagcagaacttgatcaacgacttcctatcaaagccgctttaaagcaactcagttttttcattcaacaagactgtagtcagtgggaattagatgctcctgtgcctaaactaccttctttagaagagtttaacggtcccgtcggtcgatatgaaaccatcttagaaattattcaagataagcaacctactgtcagagaactgctaagttaccttaatgcggggggtggacatctgacactcataggtacgccaaaagaaattgtagatgaaatggaacgctggtttaatgcaggtgttgcagatggatttaacttaatgccaccttctttaccagatagtttaaacgacgtagttacactcattgtacctgaattacaacgtcgtggcttatatcgacatcagtataaaggttctacactaagagaacacttagatttagtttaaggtctaatatattttatccaaaccatatagtagaaattaacgtaaaaagcgatggtattaacttaggaataccatcgcttttatatatcatattattaatatttgtatggatcgttatctttttcttcttgaagctttcttgcttcatcttgaataaaatcattacttcgtttattcgttttatgatttgaataacgttgatcacgatagtcgtcatcatttgaatcatttacgtgtgtatcgtggtatctttcattattattgtccgctgcttgatctttatttgaataatgatctttaatataacgttgttgttgtctttcttcttcttcattcaaaatgaatgcattattatttgcatttacatcatgatggtctcttctgtaatgatcattataatcgccattgccatacatgtcatgcttaggtttacgaacaagtaacataataccagcaattaaccataaaattaaactaatccagtttgtagcaatcgctaaaatacctgcaataattaataagatacctgcaagtttaggttttttattaattaaaataccgccaataattgcaagaattaatgggatgaacgcaccccatgtaaagaaattaaataaaccacctaatgcatccataccattatttatttctgttatagaaacctgattgtcttgtttttgagcttcattaataatttgttctttaaaatcagcattaccaataaagggtttaatcattaaaaatataattgcaactaatgcttgaatcgcaacacctatccaagtaagaacgtgttcccctgtacgtttaatgttattgttactatttctatttgttgtatcatcatattgttttaccattattccgcctcctttttttatccttataccctactgcctaaagtcttacactcatttatatataagaatgaggatttctttttactaatatatcaacgatgaatgagacgataatatacacgagacgtcattacatacatcaaagcatagattatcattacaaacactaagacaccgatataagttgttaaaaataattttatatcattaacatctaaaataccaagcaaagtataaatcattttagaagcacatagtacatgtatcatagatattataataggtaaagtaaaaataataactacttggtcattaataaccgatttaattcgttcttcttctaaacctacttgacgcataattcgatagttttttcgatcttcatatccctcagcaatattcttataatacatcatcgtaaatgtgccaatcattaagactaaagaaacaatagttccaacaaaaatgagaccaccataaatatcaaacatttccttatttaattcatcttttttatcaatttgaatatcatattgtttcattaattgagactcaatatggtctatggattgtgtatcatgtgttttaagattaaaagcaatgtatgagttaatatctgctgttgtttgataataatgaatcaattgacgttgttgatttacattatgagtaacaagtgtgactgctcctggaaatggaaatgaaaaatgatctccctttaactgatttgttttaaatgtttgattcattaatttgatatggtttaacttttgaaacatgaaatgattcgttaatattcccatttcattatgtttaagtcgtagattcgtatgattgattgtattgtaatcttgctgattcattacaattaaatatacactatttacatccaatggactattctcattatctcgctttacaaatgtaccctttttataagtgactgcgacacttccacttgtatattctctgaaagcatcaacatcaacatatctcttaatctcgttttctagctgacgtactttgtgtttactcgtagtactatgatgcacatctccactcaattcaatacgatattgtgttggcattaaatgattcgcacgttggtctacactacgatatgtagcgacgctcattcctagagtcacaataagaaaagtacatagcatggttaaactagccaaaccgatagaattagaattcattcttgagcgtaaaccagaaatagtaaaaaaatatttaggtcgataataaacactcggaatcttttgaagccaatctatcactaaaacactcagtgatataaataagcaatacgttcctattgtcactaaaataagggcaataaaaatattacgtagtgaaaccaaaatgagtgtatcttttaaggcaatcatataactgtcaccaacagttatgattccaacaatcaataagatatagagtaaaggtttggaccactgtttttccgttggatgttgctgctgtattaacttaataggactttgaaaagtgatttttatattgttgacaataaataaaaatagcatcattatcgctaacatcaacaaggtgtatctcattgcacttatatcaaatggatattttttcaaagatacatgcgtataccctaatattctatttaacgacatataagttaatgcaccaaataagtaaccacctatcatactcagacacccaatgataatatattgataaattccttctataaacaacattaacctaaaatgctttttttccataccaagaatcatattcatagccagctctttttgacgacgtcgcataataaaacgattagcataaagaataaaaaggaggccaaatagacacataaaaaaatttcctatactaataaaaaccggaattacatcactatgcttatgaatcgaagtattcatgtttaaggataataaaataaattcaataccaaataatgtactgatgactagaataaatggaattataatatgacgctgtgtcttaaaattctgaatgactaacgtccaaaccaagcgaaaagtcattttaatcaccactttcgtgaagcattgctaaactatcagcaatacgtttttgaaactctgattgtagttcctcccctcgataaatttcatgatataaacggccatctttaatgaacaaaatacgtttggcataggaagcatccacagccgaatgtgtcaccattaaaatggtttgctcatttttattaatgtctctaaatagttccataatcgttttagaagttttagaatcaagtgcacctgtaggctcatctgcgagtaacaaatctggttcattaatcagtgctcgacagatagccacgcgttgttgttctcctcctgatatttcaaaaggatatttattaagaagtggttcaatatgtaactgataacttaagcgataaagacgatgacgcatcgtttgatgtgagcgattcgcaagtacaagcggcattaagatattatctttatttgtcatcgtcggtaaaatgttaaaattttgaaagacaaaacctaaatgatctcgacggaaatatgcgatttctttattacgcaattgatggatattttgcgcgtcaatcgttatcgtaccttcagtagctttatcataagttgcaattaaattgagtaaagtggatttcccagatccagattcacccataattgctacaaattcacctctatccacattaaatgaaatgccatttaatgcggtcgtagcattcagacctcttccaaatattttttttacattattcacgtctaacaacatgatatccatgcttcctttctttttattaaactctttaatttatcacttacttctatcataaaacaaaaagaaaccggtaacattaatcatttcttaaaaatgttactggttatccttacattattgaaagtttaattattttctgggaaatgtatgtcaaatgtagttccttcattgagtgttgaagacacttctattttatgatgtaaatgtgccgatatatgtttaacaataaataatccaatgccacttgaatgttgatgaagtcttccgttatagcccgagtagcctttatcgaagattttgggaagatcggctttactaattcctacaccattatctcgtatagatagcacacgattttcgttgttaaacgtaatccaaatgtctttaccacgtgcatatttcaaagcattattaagaatttgttctatcatgattgtacaccattgaacatcagtaagtacttcatcttcacaacgtgtgtaatgaatgtttgttttttggtcgatgaattgaatcgaatatttcataataagaggtttaacgagatcattaatggctactttcgaaaaggacatatccgtttcttgattcattaattttaaatagctaagtgcaagactcgtatagttatcaatttgtataatttcttgacgcacgcgattcactacattatcttcatttctttctagaaggagttttgaagcggtaataggtgtcttcatttgatgcacccatgttagaaaatagttctcaacgttgacttgatatgcagcttgttcattttttacacgttgtaattcatcttctaagtgagcaacttcttcttttaaagacattgcttcttgaaagccactaagttgaatcaaccaaaaaataatcattatgaaaagaataattgccatacctagaaagaatgcgttgaaaggcaaattaaaaagaaaaaaaatcaccaaaaaaagtaatagaaataatgctactatcatcatttgatgacgtatcgattttataaatgcttttaacatcatatttacaccttatatcctacatttttctttgtctcaatgaaatcaacaataccgatagattgcagttttttacgtaggcgtgtcatatttactgctaacgtattatcatcaataaaattctccgattcccaacatttttcaataattgctgtacgattgacatattttccttcattttgaaataatttattcaaaatttgtagttcagtaaacgaaagttgtacagagtcattgttgtagtatagtgtggcttcatcaacaacgagcttacaccctttaacagtcatctcattatttgaaaccgttaaatcatatgttctacgaagcaatgcttgaattttcgctatagtaagtgacaaattaaatggcttttcaataaagtcatctccacccatttgaattgccataatttgatccatattatcagtacgcgaactaatgaaaataattgggacattagatactttacgtatctcttggcaccaatgataaccattaaatgtaggtaaattaatatctaataacacaagttcaggttctgcagttttaaattcttcaagaatattatcaaattgcttagcaatactcacttcatagttccaatgtgagagttcattccctagactttctgcaatgacgacatcatcttcgacaatcaatactttcatttttttcatcctttattttgcgtcatgatcattattgtcattaggattagacattttatttttttcttgttcaaatttattttctttatgttttgtttttttcttacgttttctttcttccataatagataatgcgataaatacaactatcagtaaaggagataacattacgaatatcattattgattcacctctatatatttattaatgacatgatttctttaactttattttaacgctttttctttaaattgaatatattcgagattaactgtttcataaaaaagtaaggagcgagattcgaattcattttgaatacgccgtctcactcccatgcttcttttacttttaatcttctttatttaaaatatactttctaatatcttctatggtgatcgcttctttaatttgtcttttgatatcattgatttttgctgttcttcctatacttcctgcccaacttttaggactatgctgttcccaatcatctaattctttaaatagttcttgtaatgttgtcatatgtttaccaccttttttaatttgggtaaataaaatagccctccttaaataagaagcgcttgtcgacatcttcttatctttcaggaaaatcctgttggatgtagcacctcacgcaaagcgcagttgctgaagtttcatagggccaattccctccacttactcttaataagattaaactattttatttaatactattatagcatacattttcaattctttatattaaattaatttattaaatcatagaatatgataaattaataattttttacaataccttaaactaaagtttactaaatacttacttcaaatcaaataaagtttcttaatataaagatgtaagtaatctatattttacatattagggggcttttttaatgatgagtttcatcaataaatttggaaaaaccacagtagcaacttcaattctagctgcttcagtattaggtacaacacatgtgtcattcgcatctggtgctggacaaggtgctcaaggtcaacaaggtcaagatggcgattacatggccatcggtaacactaaaaatcctaaaaatgtgattttcatggttggagatggtatgggtccttcttataattcagcttaccgttattatgcagataatcctaataccaaagaattagatcaaactgcttttgataaatatttaaaagggactaaccgtactaaccctaatgatcctaaagaaaatgtaactgactcagctgcaggtggtacagctttcgctacaggtcataaaacatataatggttcaatctctgtagataatgataaaaaacctttaaaatcagtattagaatatgctaaagaacaaggtaaatcaactggtttagtgacaacagcagaagtcactgatgcaaccccagctgtgtatgcggcacatgtagatgatcgtgataaaaaagatgaaattgcacaacaattttataatgataaaattaatggccaacataaagtagacgttatcttaggtgggggctctaaatacttcggtaaagaaaatggtaatttaactgagaaattccaaaaagatggttacgactatgtaaccaataaaactgacttagctaactctaaaaatgatcaagtattaggtttatttgctgaaaaaaatatgccgttacaaattgatgcaccacaacaaaatccattattagcagatatggaagacagtgcattatctaaattagaaaaaaatgataaaggattcttcttaatggtagaaggcgcttcaattgataaatctggtcatcctaatgatatcactggtgtcatgtcagaaatgagcggtttcgataaagcattccaaaacgctatcgactatgcgaaaaatcataaagatacattagttgtcgcaactgctgaccactcaactggtggtttatccatcgctaaaggtaaagattatgtatggaatccagacgctattcataaaatgaaacattctggcagttacatgactgaacaaattgctaaaggtaaagaccctgaaacagtgatcaatgaaggttatggtgtcgacttccctaaaaaacaattagataaagttaaagatgcagcaaaagaacttaaagacgtaactgataaagcaaaagacgataaagatccgaaaattgctgaagcaacaactcaattacaagatgcaattcaaaaaccaattaacgatgcatctcatactggttggacaacatatggtcacactggtgaagatgtaaatacttatgcatatggtccaggtgctgataaattccgtggtaacattgataacacggatagtgcgaaaaacatcttcgacttctttggtcaagatgttacttctaaccaaaatcaacaatagtatttagctcatagataagacgctctctataattaaagagcgtcttattttatggtcagaaaaaaagcactttagcaagtaaaactgctaaagtgcttttattacatcattatttaattttttattttatctcatttaggctatctttattggaatagagcctaatactagtatatcaaggtctcttttgatatctttttcaattatgtttttttacttaataatatttttaactataaatgattcaatttaattataattaattctttcgtacatcaacatattaagacaaaaaaccaagatatttcaatattagaaatatctcggttaatatgattaatattcgatatttggcatttcgtttactttgttttgatattttttgaaagcaatatagcctacaaaaccaataatagttgtaactaaaagttttttcattattgtcactccttttaaatttagcgtacattagatttgtttcatgaaaaacaagtctagacataaatatattatacactcatttaatatcatttttaaagtcaatcgaacgaattgcattatatttatgttattttagagaatgtattgacaacaatatttaatttttcatcacaaataaacaaatatatatcgcaacaaactctaagaaagtaagaagataaatatattttaaattcaacttttctttaagtggtatctcccaatgtggatactgacgttcataatatacattttgactaaaaaataatcctaaaccaaatggtatataagtaatgatgtttttatactttgactctaactctattttattaagacaatgtctcatcagcacttgcaatataatgacaatggctaagaggaggagtaggtgaatcattttattaatcgtactcctttcacaaataatatcacaatggcttgtaataataccataagcataataaaaataacactttttaaattgatagcatcaaacacgtgatacgtaatcgttaatgggtatgtaaatactgtccattcaattaaatcagtaacgatataaaatgtatccttgcaatataacatggtgtcacattctacactacttctttctatacataaaataaggttaggaaaatagaatactaacacatgatatattaacattctactttactctaacctcttttatattaaatcatatactttcgaattgcattatttatggctgtcgcaaaatgatccattgttgatgtccaatttttttcatctttacgtgcttttgacgaatcatcaccattactgaaaaatgattttcgaagatctggtgttaattctaattgcacgccttgcccttttttattataattcaccacattatttgtgtctattccagctaagtgtcccaaactacgttgtacattaaatttaaatgcgcttagctcttttgagataagttgaattaatttttcatctctacccccaataagcactgtatttttcccttgagattgtcctgcgccatgaatagaaatggatacctctttattatagttacgattaattaaatccggatcattataattagtagatgttacatgtaattgtgaattatttttatttctagttccattaaatgcataataatcataatttcctttattcgcaatggcttttgttaattctgtcgtccctttctctatactaccgccatgtggcgcaaagataagaacgttactgtgtctattcgtactttcttttgtccaatcttttccttcttgtgtatcatgtaataagtcagtcattgaacgataatagtccgttggcttcacagatcctaatttataggttggtggtgtgaccattacaggcgcttttgatgtttgtgttatttgttgttttattgtagttgaagatggtgttttagttactgatgttttaggtgcatctatttttttaactgcagttgattgagtcttatttaaggtcgtattcttagaagttactggtgttttaggtgttaaagttgattttgatgttactttctttgtcgttgactttgtggttttagttggtgcagttgactttgacgttactctctttgttgtcgactttgctgttttagttggtgtagttgactttgacgttactctctttgtcgtcgactttgctgttttagttggtgtagttgattttgacgttactctctttgtcgtcgactttgttgttttagttggtgtagttgattttgacgttactctctttgtcgtcgactttgttgttttagttggtgcagttgactttgacgttactctctttgtcgtcgactttgttgttttagttggtgcagttgactttgacgttactctctttgttgtcgactttgttgttttagttggtgcagttgactttgacgttactctctttgttgtcgactttgttgttttagttggtgcagttgactttaacgttacactctttgttgtcggctttgttgatgtaactggtttcactgctactgatttagtgcttgtagtatgttttgtgttagggacttgtgttgatgtagtagttggttttgtgttagacaatgaagttttagtcgttgaaacttgtgagtgcgttgttttcgtgatgttctttttctgtgtactagaattcaatacttgatgtgtttcagctgcataagcattattttgtgcaaatccaaaggcgcctatccctgcagccgttattgctaatcccaagaacgttttagttgaataagataaatatgtagtttttttatttttcattgttttccccttaatattattaaatatatagtttaataatactaagattttcaaaataatcaataatatattttgttgttttatttatttttaaaattaaattaatatttactacaacaaaagaagctgaactgtcgatgtacatccgttcagcttcttttttaagattctttctcatcttttaaatgtttaatatcttgaaacccttctcgataattcgataattcttccataatcgcataccaatcttttccaactttttggaacgtttgttgcattaattcatcttgtgctttgtttaatttttctactagtttacttcctttaggcgtgggaaataattgctttactcttcgatcttcttcagattgttgttcaataattaatgcttcttcttttaactttttcaatgttgcgtgagacccttgctttgatatttctaacgtatttagtaactgcttaatcgtaataccaggcaatttattgataaaaaataaaaagcgatgatgttgtcgactcataccatatttttcgataatttcatctgcagtcgtcacaaacgttttataagcgaaataaaatagcatgtgctcataatcatttttatttcgatccatattcactcgttccttttcaaagtcattattaattattatagtaaattttctaacgactttcatcaaaaggtcaataatgttgactttatttataaccaggcttatcctatatatgtaaacaaaagcaatacaaaggtggaattgaatatgaaacaacgtgtaggacaatatttaatggatgcagtacatgaagcaggtgtcaataaaatatttggtgtgccaggagattttaatctagcatttttagatgacatcgtcagtcatgaaggcgttgaatgggttggaacaacgaatgaactaaatggtgcttataccgctgatggttacgcacgaatgaatggactaggcgtactcgtaacaacatttggcgttggcgaattaagtgctgttaatggtattgcaggcgcttatgcagaacgtgttccggtcattgctatcacaggcgcaccaaccagagctgttgaaaaggcaggcaaatatgtgcatcactctttaggtgaaggacactttgatagttatcgacacatgtttgaacctattactactgcacaagcctatattacaactgaaaatgcaacaactgaaattcctagagtaatcaatgctgcaattcaagaacgtcgacctgtacacattcacttaccaatcgatgtagcagtgtcagatattgaagttgaacaaccattcaaagttgaaaaaacacctcaacaagatgtatctcactatgtagatatggtggccgataagttacgttcagctaaacaaccattaattattactggtcatgaaatcaatagtttccatttacatgatgagttagaagaatttgtaaataaaacgaatattccagttgttcaattatcgttaggtaaaggggcatttaatgaagaaaacccacactatatgggtatttatgatggggaaattgctaaagatgacattaaagactatgtcgatcatagcgatgctattttaaatattggtgccaaattaactgactcagctactgcaggcttttcatatcaatttgatattaacgaagtggtcatgattaaccatcgcctattcaaattaaacgatacgattgatacagaaattgcattgcctgaattcttagaagcgttaagtacgatagattatacaaataaacattcattcccttcttatcaacaaccagaatcaaatgactatgaattaactgatgatacgttaactcaagatatttactttaaaatgatgcaagactttattggcgacaatgacgtattaatcgctgaacaagggtcatccttctttggagcttacagtttagctttacctaaaaacatgtcatttattggtcaacctttatggggttcaattggttacacattaccagctacattaggttctcaattagccaacccacaccgtcgtaatatcttattaatcggtgatgggtcattccaattaactgttcaagaattatcaacaatgattcgccaagatgttaaacctgtgatttttttaattaataatgatggttatactgttgaacgtctcattcatggtatggaagagccatataacgatatcaacatgtgggattacaaagcattaccaaaagtatttggtggagatactgtacaagtacatgacgttaaatcttccaaagatttaaaagaaacgtttgatgatattaatacccaaccaaatcacatgcacttcactgaagtcacaatgaaatgggatgacgcgcctcaaacactacgtgatatctctaaatcattcgctaatcaaaacaaataatggatattgggagaacatttaaataaatcaattaagagcgactatatatgtcattaatacatatttagtcgctcttttttataaacttttttcatttaaaaatttattatcgatcacatcttttgtaatatcctgtaaatgtttgatattccattcactgtctgaatcatactgtagtccatgtttctctgctaattgtgatgtgtaatcatcaagattataaattttaaaatgttgtcgtgtttgtttattggtaggacgttcttgttcgtaatgattgaccatgcttgtccatttaacattttctaaatgtacacctttaggctctttcactacatcgaagtttatccttcctaacaattgattattttcatctccaccatattgtccatttaaaaaattacctaaagaataagctaccaacgttttatggtgatgatcttttgctttaacccactttactggttgaatcacatgtggatgcgtgccaatgacgacgtctacaccctcatttgcaaataattgagcgtacttcttctgtgttttatttggtgtatggtgattttcatttccccaatgtgccgacaccatgacgacgtcgctttgttgttttgcttttcgtatatcatgtttaatagtagcttcatcaaacgtttttactgtatatggatagtttgagaccatatcatttgttccatatgtataacttaatacactgattttcaccccatttttagaaatggtatgtacacgattcgccccttttttcgaattgtatatccctgtaaacaatacgttatgatcaaatttttcccaagtctgtatatgatttgtgatcccttgatctccttgatctaaggagtgattatttgcaccattaatcacatcgaaccctgtggctacaatatccgttgctacttgacttggtgtattgaatcgtttaaatccagaatatggaatatcatccccaccaagtggagactcctgattgacaaaagctaaatcaggcctagctatgtctttctttatattagaatacattggcttaaagttatatgtaccatctgaatattgtgcatcatgatatacgacaggatgaattaaattatccccaactgctactactgatattttttcactattattttcaacaagagccataccacacatcagtgaaaatactagaaaaataacaaccgaagttatgtaatatttgtacactaaacttacgctccttattgatttagagtagattcttttatattcacgaaaaacctaaaataattaatacttgtcattattttaaaatactcaaaataataactcaaattagtttatgaattaaaaaataagaaatagaaaaagtatctatttcttactttttggttatctatccttactagatgtatcaacatgtttgatgggttgatcgatggcacttgctaatttgaaagtttagttttaactgtagtgttcattggttacttaactttattcgttgtaggtattgctggttttgtctatactattttagctattcttgcaatgaataagggcgaagattttgttgttccatttacgattgaaatcattaaataaaacgaaatatccctttgtgacgtatcatcacaaagggatatttttttatttctctactaaccattcaatggtacgttcaattgctttgtcccaaaaagcataatcatgttccccaggtccttcttcatatttataatggatacctttttcatctaaatatttcataaatcgttgattatcatcatataagaagtcttctgtgccacattgaataaagagttctggaagtgttgcgcctttatcaaccgcttcatccactaagtgataggtatctaactctgtacctttaacttttaaagcttcaccggcaatggctttgggatcaaagtcattccactcaatatcgagtaatgattgtacatcacataccgctgacaatggcgctgctttagaaaataaatggctttgagttaaagcgaattttattgttccgtacccccccattgaatgacctgcaataaaattatcttctctttttttagatactggtaacacttgatgtgcataattgtaaatttctaatatatagtcatagtagctatgaccaaaagccatattcgcatagccactgtgatctgcattcggcataatcactgccaactgatgtgcttctgcataacgttcgatacttgtgaaacgcatatacgatgtcgcatcacttgataaaccatggagcagtaataacatttttaaaggttttacaggttcatgttgtttaaaaaagctatcgtcttctggaacgatggctgtaaacgattgattcatcccaatcgtaggtgatttataattaatagtcataaatgccattattgtttcgtccttccattttataagtatgatatctattttacactttttgtagactaatggaacgttttttaatataaaaagacgctagccaaatgactaacgtttttgtcaataaattgtttcacgtgaaaacattatatatcttctctaaataaaggttgactcatacatcttggacctccacgaccacgtaccaattcactgcctttaatttcaatcactttaatccctttatcacgtaataattgattagagacatagtttctatcgtatgttaccacaacgcctgggcgaatacataatgtattagatccatcgttccactgttctctagcaccgtctatgacatctccattgccagtaggtataaattctacgtcatctacacctaatgcattggctaacgtttctcgtagctgtctagagtgtgtaattttaatatcatctttcatttcatcttgttcaattgtaaagatattcatgtgattctcttctttaaaaatagctgcatgcactgtaaatttgtcataatcaatcattgtaaatacagtatctagatgcataaatgtacgactattgggtatttcaatcgcaagtacttttttaaatgtagtatagtcgtctttaaatatatttcttgctagtcgctcaatggcttcagctgatgtacgttctgaaataccgatagctaatacatctttagaaagcacaagctcgtctccaccctcgatgttaaacggtgatgtacgatcaagccacactggtatatctgcatctttaaaacgtggatgatattttagaatatacgtcataaaaatagattcacgacgtcttgcgcgccaatacatacgattgatcgacatacctctaccaatactcgcttgtggatcacgtgtaaaatatagattaggcattggatctaaataaaatggataacgatcgtctaaatattcaacgagatgcgttgtttcaagttgaatgtcctctttacgtattccagacatcattgtttcaattaatgcttgatttgataatgttgaaaaatatgttttaatttctttctcatgacctaaaattgttttttgagattctgataaaatatcatcaatcaattgctgtcttacatcttcattttcaatcgcttcagcagcaagttgttctagataaacgacttctaccccttcacttctaagtgtttctgcaaattgatcatgctcttcttgtgccacttttaaatatggaatgtcgtcaaacaacaatccacttaaatgatcaggtactaaattttctaactctttacctggtcgttttaatagcactgtttttaacgtaccgatttcattattaacttgaattggcccctttgtcatttgtattcctccttcaagtaaatggtatattgatatgtcattatcatgaagcagcggttcaaaatatacatttcatgtatataattctatcgtagcattaaatgttaatttccaataataaaatcttttaattattgattaaaagaggattttaaaatttcaacttgaaatagctttatataatcatttaatatttattcgtctatgtgtataaaaaatgattgaagcgaatacgttcacttcaatcacccatttaattcattgctttttgtactgtactatagcctaatacgactcgatctactttacctttattaacatcaaaccaaactgtcataccattttgtttaggttgatagtaataaatacctgttgtgttgttgttaccattatcaattttttgtagctctttactatatacttttttaagttgtgttaatgaaagttgacctttgacttccatatctaataacgaggcagttttaccctctttagatacatttctgaagtattgatcatatttcaataccgatttattagatgttgtcgatttaattttaatgccattaaatttaacattttcagctttaatcgcatttttaaaatgtttatctaatacgaatgaagcattttgacccgcataaccattatagttgtaatatgatgacgttgctgcgtgtacagtcggctgttgaacaagtgcgcctgtgacgctagcacctaatagtgtactaaacgctattgttgtagctatacatacttttgttatctttttcatatgcgttttcctctttctctttaaactactcatatcatacttctttactcatatctatacaatctctatagtaatcatccatctatttaaatatttttttataaaattgtggtatactataattaggagtaatagtcctattcactccttcacaaaatgttatattacataacaatactaggccacgagtttacttcccctttgttaaacttgtggtcttatgatatataaactcattattttaatttttaaatataaaatttatttatattataagaaatcacttcaataatacgaacatatgttctataatatgagcgaggtggttttaatgattcctgatcaatacaaacatgaaacagattatcgtaacattcctagagaatatttagacgctaatataccacaaggacgtggcatgattaagtgggcaccgtttattatatgtactaatctcataaaaaatctaatttaatagggttcaaacataatttatatatgtattatgtttgaaccctatatctatttattttttactaatatcatttaaaatgtcttgcaattcttcaatttctttgttatttaattcttcatttttcgcaaaattaagcactaaacttttcatatcccctccatacaatttattaagaaaggttttagcagttttcattttaatatcatcttctttaataattgatgagtaaaaataaatattattatatttatatcgttttataatctcttttttatatagtcttgtaattaatgttctaatcgtcttatcgctaacttctttatttttttgaatctcaactacaatttcattagctgatactgattttttattccatattatattcataacatcccattcagccatagttatttcaacttgcttattggccatttaaaacacccatttcttttaatattttttcatttattaatttagcattttcaccagaggctttttcatctgataaatgtgtagaaaaataatacttatcatgatttgtaattacgtaacctacaaaccacccattattgtacttcccgtttactatacctgtacctgttttcccatacaatgcataattttcattttttctaatcaataacgaagaagataattgtttcttttcatttttactaaaatggttattttgttccatcatatttttcaaaactattacttgttcaagattagatattttcaaactatcttccaaccagtaggctttataacttcccaaatttttattaccataatttaattgcttgagttgatcataagtatagttctttgatatttgattactaatacgttcgaagtaccaattaacagagttttgtattgccgtatttaaatcttgatccttattccaagaatcgaaaggataatgattatgattccataacatacgtgaatttttatcacttataatatgacggtcaagtccaaacagtgctaaataaattttgtatgttgaatcaggagaatatctttttctactttctttttcattataaatatagtatttgtctttcttcatgctgtacataacgaaagatccactatttgaaccaaaatttttactttcatctaaaatttggtaatcgctttgtaagggctttttataattataatcagttaaggattgccccattaaaaactggctttgaattatcatgataaaaaaagtaaaaatacaaacaaaaattagaattaattttgactgctttttcaaattggcttcttttatattaattaatcttcttttgagtaatgattttttaccattaaatgaatggcttaatatatttttgttgaaaaatggggtttttaatacggaatccataatagcttccgcataagacttaaattcatttttgttaatattattaaggacaaatctatcggcttctacttcattgtcatgaatcatctttctttttacaatttgtattagtggattataactcatagcaatagaaaaaatatgaaagataattaaatgcaaagtatctctgtttttagcatgagcatactcgtgcaatattatatattttagttttttgtcatttatacttttaaaatataaactgggaatcaaaataatatattttccataccaaaaagttattggagaatgaatagattctgcttttcgaatcacaatatttcttttatattgatgattgaaaagtatcttgtttattttatctttttctttttcatttagataaagtgactgtttctttaaatacttaagatataataaagaatttaaaaatttaaaacttaaaataataactaaaactatccaaataactgtgcagatattatctattgaatcccaattaatcttatggatgtctgttgtaaactcatgaacaggtttagtggtatttatgttaggattcaaattgtgtgaattactttcaactgtgggctcttgattattcaaattattaaatttaaaaaaagagaatttaatagggatgaaaggaattaatcctgcaagaagagttagataccaaactttataatttaacatataattaaaatagcgttttaatatgtacctaaaaaataataacaatagaaatataaaacaaaagcttactatgctcattattaataacttagccatttcaacaccttctttcaaataattataataaactattgacgcgaatattacaattgtaatattattgatttatagaaattacaactgtaatattggagggtatattttgaaaaagttaatacttttaattgcaattgctttagttttaagtgcatgtaattcaaccagttcacatgctaaagagttaaataatttagaaaagaaatataatgctaatattggtgtctatgcattagatactaaaagtggtaaggaagtaaaatttaatgccgataagagatttgcctatgcttcaacttcaaaagcgataaatagtgctattttgttagaacaagtaccttataataagttaaataaaaaagtacatattaacaaagatgatatagttgcttattctcctattttagaaaaatatgtaggaaaagatatcactttaaaagaacttattgaggcttcaatgaagtatagtgataatacagcaaacaataaaattataaacgaaatcggtggaatcaaaaaaattaaaaaacgtttaaaaaaattgggagataaagtaacaaatccagttagatatgaaatagaattaaattactattcaccaaagagcaaaaaagatacttcaacgcctgctgctttcggcaagactttaaataaacttatcgcaaatggaaaattaagcaaaaaaaataaaaatttcttacttgatttaatgttaaataataaaaacggagacactttaattaaagatggtgttccaaaagactataaggttgctgataaaagtggtcaagcaataacatatgcttctagaaatgatgtagcttttatttatcctaagaaccaatctgaacctattattttagtcatttttacgaataaagacaataaaagtgataaacctaatgataaattgataagtgaaaccgccaagaatgtaataaacaaattttaatagtctaaatgtactacaaaaactgatataattctatctttcataaaacttcataatatcgaagagtccgggacataaagttcttggataagtgaaaaaaagacaatttctattgaaataatatagaaattgtcttttttataaattttttgattattttcagctcgttgagctactacttttcttatattaagtgccattaatacaaaaccaagttctcttttgactttattgagtcctcggacagacatccgagtgaaacccaaaatagccttcataaatccaaaaacaggttccacatcaatttttctttgactgtagatattttttgtttctggttctgaaagctttttgttaatttgggatttaaaatattcccagttataattcttcattatttttttgtttgtttttgaattgaagttcatacattgatttttcagaggacattctgaacaatcatcacattcatataatttgaagtctcgcttataaccatacttatcatgacgataggcatatcttttaaaacctagccgtttattattcggacaaatgaattcgtcattaatttcctcatagttacaattttgagtattaaagatgtcacttttatattttttagttttatcttttataaacattccatatgttatgagtggcgttcgattaaagtcatctataattgccttataatttgattcactaccataacctgcatcagctacaatatattcaggtaaatgaccgtaggtctcttgaattgaatttaaaaatggaatcatcgttctagtatccgttggattttgatacacattataagataaaacaaattgggaatttgtcgctatttgtaaattataccctggcttaagttgtccatttttcatgtgatcttttttcattctcataaatgtcgcatcatgatctgtcttagaataactatttctatcctttaaaatagatttttgaaattcgtatcgatactttcgctcaaaataatcattgatttgctttttgtattttttgattttagttcttttgagacgtatttgttttcttgttttagtacatttttcattgttgatatgttggtttaaatcttcgatttctttatctaagtgactaccaatcaaatctatttcttcttttgttaattcattatcatgattttctttaatttccggtatgattttattggttaccaattcatggtagagggctttagaatcctcattcatctttaattcatggttttgaatactctttttccatacaaatgtatatcgattggcatttgcttcaatttttgtaccatcaataaaaatagctttatcatctataagattttgttttacacactgactgtaaaattgaataaataaagattctaataaagcatctacttttggatttactctaaatcgattaattgttttataagaaggtttttgattttgtgatagccacatcattcggatgctatcattaagcattttttctattttacgacctgagaatacagattgtgtgtaggcatatagaatcacttttaacatcattttaggatggtacgaagttgcaccacggtgatgtctgaattcgtcgaattcattgtcaggaattgtttcaacaatatcatttatatgtcgtgaaatatcatttgtggggataagaactgaagtttccattggtagagtaagttgagtcatgttataatttttatacataaggcacctcgttaatttagtttagtgatgtttattaaattatacgaaagtgctttatttttttaaagtattacaatgtaaaattacatataaatacaaagtattttggcgagactcttgagggaacaggacaagctgaagactacaggctgaagctgtcccctaagaaagcgagccaacaatacggagtattgtaaataaagaagccagtaaatgaatttgttaaaactcatttactggctatttctctagggtttatgtcccagactctatttttttatgttcacattttttaaaagagaaaatactattaacataccaaacatcataattccagttactataattataaatgctcgataatcttactcaacttttccatataaaaaataacttattttaaattaattaattaatcacattaaaaaattatataatccttgccaaaaaagaacatacgttctacaatgatgatgaggtggtaaacatgattccaaatcctaatgcgccagatgaatataaatatgaaactgattatagaaaaataccaagaaaatatttaaaccctaaaatccctcaagggcgtggaaaaatcaaatggcaagcttttgcgactctcccgcaacagtttgaaattttagaacaaattataaaggatcaaaataaaatagaaaaaccattgctaacacatgattcattagataatttagatcagatttttcaaataaaaattcaaaatgatgagttatgtacaatctcatattgggaagacggcagcatttcaaactatacaggaaaaattttgaaaattgatacaatcaatggttattttacattttacgattctacaaatactaaacatactttttttaatactaatgtgtataatatctcttaaactcgaattatttctctttacctgtgtattaaatatcttcatatattttattatataatgtgtttatttcatctttgagcctctttttctcattttctaaagattttactctcctttttaatgaagaaattaatgcgtctttaccgtcactgttatttttatgtacaaatatgtctttactttgttcacgtaactcttcgattctctttcgaattttactattattatataaagtagctttagatacatttgaatgcttagcaacaatattaaagttaatttcttcattttttcgaaccaattcatttattgctttagaaactttttgctcggttttaacttttcgttctgcatgtaactgttttaattgttcttgtctattaaattttcccatcttaacctctatacttttattctattacttctcccgaatataatgtttccatcttttatattacctaatatttcttcatatttatttaatatattagtatgtttttcaaccatatcttgtctattattatttttagctaattctatagatttgaccgttgatttgatatgtaattcatatttttcaacatctaaatcagaaaatccaatagctagatccttacatggtttcccagaattacaagttaagcatggcggagcttccatatatggacaatcaccgctcaatctagcatgacaagtaccataaggattgtccattgcgtttaatttatgttcttgccataaagaattcaatgctttttctgataattcactactatgctgtatatttttaattttaccgtcaacatcaaaactaaaagccccttgatcaataactgattcaaaagcctttctttttgtatcatcaagtaacttagcatatctgagtgtcatttctggtgaggaatgtgctaataattcttgtatggttaatatatctgctccaccatttaacaatttcactgcataggtatgtctaaactgatgagttttgaaatggaagacttcaccttgttcatcaagaatattttttgtttttgctaaatgatttaagtgtgctctgaccatatgctgtgtaaagggcattccttttctttttcctttatgaatagcaaaaatataattattagggttgttatcttttgtacttttaattttagaattggctattaaaactgctactatatcagctaattcattatcgattggtatcctatgtcctttaacaaaagttttagcaatatcagtaattattgaaaactttccattaacttttgcaagacaattattttttaatgttaatacatcagaaattcttagtcctgttttaaaagctatccaaactacaggtattaaatctttgtgcaaatcatttatatgctcaaaaagctgttccaatacaaaatctgggatataatcaatttggctactatttttcttttcgcgcttaggaaagtcttgaggataaattaaaaaacgtatatcttcagagggggctatatcataattttgactagcaatatcatttaagaaccttctaattgcttttaattcttctctaacgaagttcctagaactttgcacatttttactattagcatattcaaataaaaattctatatatgcttcgatatgacatctatctagttcatttaaactattccttgtttctttatttttagatatattttgaaaaaacctagtcaaaactcttatataaaatcttgctgtagcaaatgctatatcaccagttatcaaacgattttttaaatatttttttgctaattctcgcattttaattgactcaattttttcaaagttcaaataattaccagttagtgttttattataactcaatccatatttttctaaatttctaatatcccatttatctttttcccattcttctcgcttatcaataaatttatttagattaatatacatattctttaaaaaagaagctagtccacttttatgttcataatcaccaaaaactattgttgatgattttctttttataggtatattatttttagtcaaccaactaaaccagtacttttctaacatattaatatcacaatctagtaaagaatttaaatttggataaacttcattaaagaactcagcaatcttgttaagtttcactgctccagtattaaatacattagataaagaccaatcctctttaactataagtttcaaaaaaaggtatttaaattctaaattcaaattttcacttttaatcctaaagaaaatattttttcttttgtctttatagttcttgatactatcttgaaattgctcgaacttgttaaaagctgaaatgtgccattcatcattttttaaaaagtaatcatcatatatttcagttattagcacttctccttttatgtttatagttctactttgtaatgtacataattcattaatcatagtactgtttgtaggtaaattaattggtattgacatagttattcccctttattaaaaacttgaaattgatgcttaactttattccaatcttcacgtatatcttcttcagtgggatgaacatataaattaatagtcgtttgtatattactatgaccgagtctttcttgaacttgtttaatatccttagtttcattataaaaaacagttgcatgtgtatggcgaaataaatgggggtgaacatttatagatgttttatgttttagccttttaaataatgaatatatatcactataatgcatagcttctcctacatttctaccctttatttttacaaaaagataatcagaacatatggaaagttcgtcaattatttcgtacacataatcgtcatataaatcaattaacgattgagaaataaatatttttctttcaccagtttttaaataagtaccattgctattaaatctatttttcaaaactatttggtgaccttttctaaaatcaaatttgatatcatcaatgcgtaatgataatacctcacctatacgcaatcctgtttcatataataattgtattaagaatttatctctaatattattagctgctcctaataatttcttaacctcaacattggttaacacttctagttttttctttggttcttttactttcaaaatatttttcaacattccatagtccttgtttacgtgatgcatgaaacttttatattttttagagtatttactttccgtatgtataaaatcatagaaattaacatctaattttttgctcctatagagataatcataaaaattagatactacagtaatagtcagattaattgtcttaggactaatgctttttccttttcggtgataagagaggacattctcatattcaaaaggtgttttcatccatcttataaaatcaacaaagttatcaaaactaacttctttatagcatatctttttactttctaagtaaacaaaaaatttttttagtgcataggcataggttttcttggtatttaaacttttattaacactatccagatacttcaaatatcttactgcatctactataggttcattattaccatctaaaatcataaaattgataccattcttagattttacttctactattttcataataatctcatttctaatttttaatagtataagtatacactattcgaactctttttacatcatacatattaaacttattacacgtaataaaaaaagactatttaatatttttactttgttcattttttcttaaaatatgattcattttaaacaaaatagtctatattcttcaatatatatataaccttttgcagtgatgcctgaacagtatgaacgcataaacgcttttatcgaaaatcaaaataaaatagcgatgccctctttgtcggatgatcaattcaatattctgaatcgacgattaattgaaaaatatacaacgcatcaactcgctatgattagttattttagaaatggtacaattcattctatcgttgcttatattaaacgtattgatactttaaagcggtatattacaattagtaatgaaaatggctcacaaacaatgcaactcgattttgcagtattatgtcacattgaataataaaaaaagagcgggaattgaactcaattccgctcttatttatcatttatttacttgttgtgacaccttcatagccaatatctacttctactgttcttccatgtgtgataacaaaagaaacaattaatccatctttcttaggttgatattcgaaaataccactttttttatcacttggagtaccttttacttttttaaaatctgagccatacgcttttttcaattgatcatatgttaaatcccctttaacactaaattgaactttattcgcctttttaccatctttacttacaccagtaaatgtttggttatatttttcaagttttttattactatgcactttttcaaattttattccattcattgttacatttccatatttaactgctttaataaactgtttattggttacaaattttgcgtctttatctacatacccgttatatacataatatggctttgtagctgcatgcgctgtatcctcgattggtaaaacagttgtacttacgcctaacattgtcccaaatgctaaagtaactgatgctatagatttaactattttattcatgattgtccttctttctctaatggatttttatttcactattattatctcatactctttgtcttaattcactgtactttagatgtatctatcacagaattatgtaaataaaatgtaatatgatttggttatatacatactacctatttgttgaactttgattataataaactaaagaaatgaattaaaaatggaggactatcatttgaaaaaaatattagcaactatagtcattatattacttattgtggcattaggattttcagtcttttttgcagccactcattccaatcaatctgactcaaatcaaacacaatctaataaaaagaaagataaaaaagaaactacttctgaaagtcatacagttcaatctaatgaaacaagtcagtctgacaatggtaccactacgcaatctgagtcaacaagtcaatcaatacaagaacaacaacaaacgacgcaacgtccctctactgttcagactacacagccaaaaacaagtgaatcatcaactacgtcacaatcacaacatcgttcagaaagtaacacatcaaaacaacccacatctcaaagcacagaagacaaaccatcttcagagcaaacatcaactgaacaaccttcaacagaagaaaaaccttcatcgcaacaaagtacgaagtcttctactgaaagtcatactcatcgtagtagtgaatctaataacaaatctaattaaaaataatagcctgactgataatgatgtttcattatcaatcaggctattttattttctattctgttactttactttcttctacacgttttgcaattttagtcataattggatctaagaatggtttagcaataaatccaattaagaagaaaccaagaccgaagagcccaaatataattaattttgtaattaaaatttctggtacaataccacctacaacttcacgtaaacaatcaattaagtacgtaaatggtaagtaaggtgaaatgttttggaagaacttaggtagtgtaactactgggaaggtaccgccaccgcctgcaatttgtaatactaaaagaatgatggctaccgctttacctgggttacccaatatagatacacacgtataaacaatggtattaaacactatggctccaaataatgcaacgagtacaaagagcaatggtgattctacttgcgcatgaagtaagaataagtcacctgttgtaacaatgagggtttgtaatacacccatcaagataaagaacatccctttaccaagatattcttgacgttttgttaattgatcagcaagttcttcatgtttgttgtgtaccgttaataaacttactaataataaggcacctacccaaatagctaatgccgtatagaatggtgtcatacctgaaccataatctctgactgggaaaacatcaactgttttcttattgattggattcgcgataacatctgcttgttttttcaaatcattttttagactattaacaagcttatctactgcatcatcatcgtccaattgattgaatatatcattagccttatttaaatctctttcgatgccaggtaattttgtttgtgcaaagttcgctaaattcgctaaagcttcttttgcttttggctgattctcatctaataaatctactgcgttatcgtatttatcaaataatgttggtaagttagcattaacagtagctgttgcattcgcaagacgttgttctaaatcaggtaaatcattacgtacaaagtctgcagcttttgctacattttttcgtactgttgggaagtaatttttagcagtttgagttgcttcaatatatcccgcttcaagtgatggtaattcactttgaagtgttgcaatacgagtttgaccattacctacaatatcttgacctgcttgaatcacttgattaatcgtatttaatttagattgcacatctgataatacgacttggccttcacttaattgttttgtaatatcattagaaactacaagtaaacgatgatttaaattatctttaatgtaatctctataactacctaaaccagaatttaaagctggcaagcttcttaatacattaatagactccgcactacctttaccaccacttgataatgcatcaatcaattggttagtagaacgtaacgtatcattaatacggttattggtactttcgattcgtttaatttgtggtgctaaattcacatgttcacgttgttgtaattcttttaatacatcaatcaattgttgattgtattttgaagtgttttctaaacgtcctttaatatttcgaagcatgtcattatattctgttggacgattagaggcaataacaccatacgttatatctcttaatgcttttacatcagattgtgatgccttagcttgcttatccgcatttgaagataatgcaagtaatgcttcagcaagtccactattcattgatttaacatcttcattcgaaagaatctgaccattaggtaattgatcattattcgaactattacttagtttttgaatcgtatattgaggcataccgttgtcattagttgtcgcactttgttgtcgtaaattattattcacattaccattaactgcttgtgctcgcctagttgcctcttgataatccccaacacgttgcttagccatacctaaataaccttgcgcatcattaagttgttgattcgctaagtctaatccttgactcgcaatctctacccctctattaattttagggaatgtctgaggaatatcatctgctgctacattcactaatttctgaatgttaggcatatattcattcaatgcgagaattagttttgctttttgatttaaagaaggaatcgctgcattgacatcatttaatttttgttgagcatttaaaatatcatctttataggtatctaaatcacggaattgattcgcatattgatcaagctgatcttgatgatcattaagataaacaattctatctgcaattttattcaatttaggtaaagattgatgggcagtatagactgcatttttaattttatcgatagttggtacttcgtcttcaatttgaagacctactttatttgctgctttcaataatgctttcgttacagtagtattaaattgtttattggcttcatcaacaataattgtcgaaccggtatcagtcattttaggggcgacagcattaattttttggttcactttatatgtaatatctgctttttccggatgtttacgaagtgttcccgtaatttgatgtgtaaatttcttaggtatataaattcctgcataatatttacccattcgtatttcatgatctgctttctcccgactgacaaattgccaatcaaatttatcattgttcttcaatgtgtcttcgagcgtattacctacattaattttcttacctcgaattttatcgccttggtcttcgtttacaactgccactttaatatgacctgtattactatatggatcccacattgcccataaattaaaccatgcgtaaaatgaaggtaaaattgccaaaccgcctagaattacccaagcagcaggtgttttagcgacacgctttaagtctgtcaaaaatagtttaaacgcgttcttcattttcactctcctaaaaatgaaatattaagaatttatatcaatatgatttaaaacattgttttttatatcgtagaattagtataatacttttatcacgaatgccataattagttgatatacgtcaacaattaaaatggtactcatgcattatagcagaaaataattttaacgacaaagctaatgctacgttaaaatacgatagaaatcgtctgacttaagacggatttataaaatatattatacaaaagtaaggagcgtttattgatgtcgaagcaaaaattcatgatatatttgctaactacaactctggttttaccaacatttacgtctagtgttgctcaagctgaagagactacaaaacaaactaaaacatctgaatcaaataatgaggattcaacttctacatcagaaacaacacgtactgaaagcaatgaaattccatcttcagaagattcaacttctgatagctctgataataataaaaagcaagactctcagtcaaaagaaagtcaatcagacacagtttcaaatgaagatgccgcttctcattctaaaccatcatcaacacattcgaaaaataatcgttcatctaatactaaagatgaagacacgtatcatacaccattatctgtatttagcatgaatggttcaaatcattcattctcatcaaattttttagatcctagtcactttgaaaatggctttagtttaacaagtttgatttcatctttattccattttgatgatgatatttctaaatatgaacatgttgaaagtgattcatcttcatctaatactaatgatgacaaaaatgcaacgaatataacttcttcagatgaagatcgtactgaatcatcacagcaacacacaacaatcgatgcatcacctcaagactcatctgacaagtcaaatagtcataccacatcatcaaatcaatctgatgtactaacagaaaataatcaatcagatcaaccgtctgagtcatcatttaaatatagtaacagtaataacaatcattcaactgatgattctagcgtaagcaaagctttagattcattgaatcaattagcttccgatttaaatgattctaataataatgagtcctcgacatctgaaaatagcaatcaatcaacatcacagcaaacaacaaaaaatacaacatctcaaacctctcaagaagagcaagcaacacctaataaagatcgtcaacaatcagaggatgtactagatgcgcttcttgataaatatagtgataaagcaacacaaacacataaagactatacatcatctaaaaaagacagcacatctcaagcatcacaaaatgaagattcaaaaaaagatacatcaacaactcaagaccaactagacacaaataaagacaatccgcaattgccaacggagaaacaactaaaacataaacaagaagcaccacaatcatttgaaaatgattttaaacaaagtaatacacgcgctataagtttattccaagatgtaccacaattagatgggaacaatgttactaatggaaacatggcagtggtagaaaataaagcaacacgtgaatttattacatctattgccaaagatgcgcataaaattgggcaagataatgatatttatacttctgttatgattgcgcaggctattttagaatcaagttcaggtaatagcgctcttgcacaagcaccaaactacaatttattcggtatgaaaggtagttataaaggtgcttcagttaacttcaatacacttgaagctagtagtaataataatatttttagtattaatgctagtttccgtaaatatccaaatcttaaagcttcattaaaagattatgctgatttaatcaaacatggtattgacggtaatcctacaatttataaatcatcttggaaaaatattgcaccaagttatcgttcagcaacacgtcatttaagccaaacttatgcgactgatccaaactatgcaacgaaattaaatagcttaattgaacattacaatttaactgattttgataaaaaacacatgcctgacttagataactactcaacatcaataggaagtagtggcacagatgtttcaggaagtgcatttaagccattttcaatttcagatgttgcttcaccgtatccatatggtcaatgtacttggtatgtgtacgaacgtgttcaacaatttgataaacatgtaggcggtcattggggcgatgcacataactgggataatagcgctgaagacgcagggtataatgtaagtacaacccctaaaaatcatacagcagttgtatttgaagcaggccaatctggagcaagtgcgttatatggtcacgttgctttcgttgaaaaagtcaatgatgatggctcaatcattatttcagaatcaaatgtaaaaggattgggtattgtatcatatcgtcaaattgatgcggatactgcctcatctttacactacattcaacctaaataaatgcataacaaaagagtccgggacataaagtatctagataagtgaaaaaagacaatttctattgaaataatatagaaattgtcttttttataatttttttgattattttcagctcgttgagctgttacttttcttatattgagaattatatttttaaattcttttgattctaagtttataagagcaaccaaattatttataatatcagatttatacaacatttcattcattgaatcattatcattttgtaaattatgcataactacatctgtcattctattaattaatttatctttattatctttttcttgataagtagatttattttctaatgaaatagctaataaaattcgattttgtaatttaacaaaataaaatctttgcgactttggaataacgattgtatattcataatattcaaagtcatctaataagttgaaaaaagctttaatattagatttaatcataatctctagttcattagggttattatttaacaatttaactaattgaaaattatctacaaattctccatagagtaactcttctacagttatacttactaaatcagcgatctctcttaatctgcttgcattaggtaaagaaatacctttttcccatgttgctacatttcctttgctagctccaaacaattccccaaacgattcttgagtaagtcctttttgttgtcgaatagatttgattcttttacctacttcttctttattatacgaatacataattttcctcctcaacactaattataataaataatagggataaattaaatagaaagttctaaaaagtacaaaaaattattgacttagtaaaaagtaagatgataatatgtatttgtaagttctaaaaagttttgaatagaggtgttaaaatgacaattaataaaatcaaaggttatagaaattacttaaatttgacgcaagaaggtatgggacaaaaattaggtatttcaaagcaaagttactataacaaagagacaaataagtctagctttaccgatgaagaaaagaaaaaatttaaagaattattattgccttattttccaaatataactatggaagatatatttttttaattattagttctaaaaagttcataatggagggttggatatggcagaacagcaaccaatactaagtgagtccgcttctttagaattagcaaacggtatcttaaaacttgccgaacagatagcgcagcgaaagatagagcaacaacagaagagatgggctacgcaaacagaattaagaaagttatacagatgtacacatagtgatattaccgaatgggaacgtttagggctaactaaacgaaagcaaggtcgtagttattattatgatcttaaagaagtcgaagaatttttactatcacagaaaaaataaattatctaagtcccgcatgttagtaatttgtgattgaacgatagtattaattcaattttaaggtggtgtttaaattgattagatttctgaatgaactcgcttatatctgtgtaattacaatatttctaaatatgtattctgaattacattatgcgttagtgtttttcttatttgggagtatgattgcagcacttaaatttgatattcgagatgaagaacattcatatctttataaaacatacagacaatatttaaggaacagaaaagagatttaagtagaaagtattaaaaatatataccgcttcaatatggagctattgggaggaataaaataatgaattgggaaacaagaaatttaattgatgaatttgaattagtgaaagaaaaatatcaagacttattgcaagcacaaggttggtttatagaagattaccttgttcatgaaagaagtcataaattaactaaagacgaggcaattacgcatggaatgaaataccatgagcatagaattaatattaaacaatttgatgaattactaagggtttacactaatgaattaagcaatattattgaacagttcaaaaaaatagataaaaaagaagcgtcatctgttcacgccagccaaagcagaaacagataacgccaacaaaaatcatttaagaaattaataaactactgaaaggatagcattttatgactaataaaatcaagtgttctaaaggttacggcgtaattacacaaagtgttatgtctagcaaagatatcagtatcgaagctaaagcattatattgctattacatggcacatgtaggcgacaatattattccaagtgctacgcaaacatgcaatgatttgatgatcagttacaaacgttttaaaacattacgaacacaattatttgaaagaggctttttatagattgataaaagttagcagcaaaggagggtagacgattgacaacatatagagtcaaaaaagagagtggtaattttgtaaccattcataaaggctttataactgacgatagattatcagctaaagcaaaaggtattttattgtatttattaagtcgtcctgatgattggcaaatatatacattagaagtagtaaagcatatgaatgacggacaaaagtcaatcaatagtggtattaacgaacttattaaagttggttatgtagaacgcagtcgaaaacgtaaagctaatggtgattttaatggttacgattatgtagtatatgaaaaaccaaaaaatattcgcgaaatgccattttgggaaaacgcgaaacgcgaaaacgccaaacgcataaatgcgaaacgcgaaaacgcgaaagggcacactactaatattaataatacctataaggatttaactaataattatgatactgaaattaacagtagtagtagtgcaagcactactaaacaacaaccaccgtcacattcttatagtaatgtattcaacttttatcaagaaaatggatttggaatacttcaaccattcgttattgctcaaattaatgcatggataaatgatttcaacggtaatgagaatatcgttatagaagcattaaaagaagcagcaacaaataacgtgtgtaaatggagctatgctaacagtattcttaaaagttggtatcaagacggtattaagtctattgacgacatagaagcacgtagaaaacaacgtgaagcaagtaagaataaaacggaatctacaaaaacattcgataactctcaatacgctgatttattttaggagggaagatgcttgaaaagtattaatgatattgatttaaaaagcaaaatgcgtagtgaattgattgaagaacaatataaccttaaatgtgataaatgcaaaaacatatatagttatcataaattcagaaagtcagacggtacaattcaaataatcagaaacgggtgcgagtgtgaatctattgagaaaggaaaacaaagcagaagccaacacaaagcaaatcaaaaacgcttgaatattgaaaaagtatttaagcaatccatgatgaatgatgatttattaaaagctgaatttgataattataaaccaactaataaaaacttattagaagctaagcagattctacaaaagtatgcagctaactttaaaccagataaaccaaagtcgctacttttacaggggagttatggcataggcaaaagtcatttagctatgtcggttgtaagagaagtcaaaaagaaaggctatacagctttattcttagatgttactgaattagtaaaagcttatcgaaatacctataacaagaatgtagcaatgactgaaaaagaattagatcaaatgattagagatgtagatttgcttgtaatagatgattacggcacaacagtaaacgattatggcaatgaaaaactattttcactcacagacatgagaacaggtaaaagtaacatcataacaactaatcgtgaagcattagaactttctaacaatgacgataaagcaaaaagatttagtcgtttgatgaaaaacacacaaattataaaaatgcatggtacagattataggttaaaagattttaaatcataagtggtaacgggctttgtacccgttccgcttcttagaaaggagtaacacatagtatggcaagtctaaaacaagcgtatcaacaagacacagacgccgaagaaatcaaaatgattagtgatgatacgttattcacagtttacaatcctaaatttattgaagataaaaagcagatgatagaggactatatcgaaacgttatacgaacgtaatacaccaaacatggtatgtgatccagtaactcaaatggtttactatcaatcgcaaaatttagaaagcttagttatgtacatcattgaagaaaaagagaaattgaatgcgttcatcagaaaaagcaatagaaacttatatcatttatacgctgttttagagggctatacaaagcaagaacagatatttataaagaattacatcaaaaatgcaaaggtgcgtgataatgagcttattagacgctttaaaattgatttatataactatgtccaagctaaaagagagaaaaggcaagaagaacataacaaaaagtcatttaatgcgtacttagtggataaagacgacgtaagaaaaagacaacaaaagaaaaagattaataatggttatggcctaacactcaatcaagagaaagagctgcgattaattaaagaacacgaagaagaacgaaatacagatatgggggtattcattgacttaattcaacagatgaacaatgatgaactcttatcttatgtgttagatcgtcatgagtttaatattgatagttataatctcaaaatattaactgacgcagcactctatcgcttgccattgaaacaaagaaaacaagcctataatcatttaaaagcaatagcgagaacactaacaaataatccaatcgaaaagaggttaaaacgatatgaacaatgatgaaatgaataaattaagtgaagcattagaactatcagaatcacaacgactagcattatataactatagtgaacgagaagttaaagaaaaagcacaatcacaagaacaaaagaaagaattaagcagtttagaaaagcatgagaaacgccaacaaatcatgtctattaaagacgctaaccaacgccaagaagaaatagcgaagcatgttgaattatttaaataggagggctattcatgaaaacattaaaacaaattgaagtgcataaaaagaatattgaaagctatcaaaaggatatacaagcactagaacaagaagtaaatagcgaaaaagaaagattgatcaacttaataaagactatcaagaattagtagtaagtggccaagttgaaaaagctgataagctatatactaaaattgataagcaagaaacgacgtataaagcaaaagtaaaacgtctaagcgttatgaagcaatcattgaaacaggttattattaaaaattgtagcagtatgcaagaagaagccgataaattaagtgatgaatatattgatatttactatgatgatttacaacactataacaagctcaaagaagaactaacacaagcagaacaaaatttagaacaacataatcatgattatctactgaaacaacgtaatttaagccattatatagatagattaacgagagaaaacaatatacaaccaactgagtttatgggtagcgtcaatagtcgtaaaccattttatatttaatcaatgtagcctacttttatagtgggcttattttatagtttaacgaggtattacatgaaaaaattaacaactaaacaaagacgctttgcagatgagtatatagaaacgggtaatccttattattcagccgtaaaagtgggatatagtaaagtatatgcaagagataatgctttaaaattattggaaaatattagtgtgaaatcctatatacatgagcgtttagaagaaataaagaatgataacatggtcgaaaattacggagttatgcgttatttaacaagattaataaagtaggcaataaatttttaggagggataaaatgaagtcattaacgctaaaacaaaagcaattcgcagatgaatacattcgaactggcaacgcctatcaatcggctattaatgtaggttatagcgaaaagtatgcaaaggctagaagccataagatgttggaaaatgtcggaataaatcaatatatagatgacaacttagaaattattcaaaaagaaagcatagcagaagcagatgagatcatgcgttacttaacacgagtgcttagagccgaagaaaaagaagaaatattggtatatgtaggcgacggtatgcaagaaatccaaacaatacagcctagtgccaaagacagaataaaagcagcagaattattaggcaaacgttatcgtatgtggactgaaaagcatgaggtagaaattactacaccgatattcattgatgatgtgccagaagaagattaaagatttttagcctatccgaaagataattcgggtaggtttttattgcaacagtatagaaaatgtataaaaatagccttataactagattatgaattctaaaggggaattaataatgaaatttgaattattagaaaaaaattataaatatttaagtagtatagaaatgacatatttaaataatcatgattttacaggaacaaataatatagcttactttatcgctaatcattttgcgaagtttaatatggaaattgagtctgattttatttttgtagatttaagtgaggatcctcagaaccaacatattatagctattactaaaaaaagtatttatgatttcatatataatgagcaaggtatagagaaacttaaattaaaaatttttaacaataaaatttcagatttatctttgcaatatgagtcactttcttctgtaaatgataattgtgatgatataaaaacttaccctaaaataccgtcatttaaaattaatttaaaagatggtgtttcttttgacataccactaaataaaaataaggttagtgtagaacctataactttatataaaaagtttatttcagatttatgataataaatagctattatgtttttggtaataaagttaattaatgataataaaagattaaagttacacgctgctacttgtttaaaagtagcagtttttaaattactataagttattgtttatgaaagagcatgattatagcttcattaacagttatgatttaaaagtatgtagtcttttggggaatgtgtacttttatttaggagtaattaaggtatcggtattttgcagtaccctatatttagtattaaataagagtttaatttgttagtatctaaagtaaaggtttgtttttctgatttttaaatttagctcatatttgcgttttaagagccgttatatagttttgggtataaataaaatatataaaatacccctaaatgctctaaaaagtaccttaaaattgcaaataagggtattttaaatttaaatagttcatgtgataagttttactaaaaaggaggcatctttttggttatttatatttcgtgtgcggttttaatggtaattgcttttggcagtctttttagagatttaggaaatcgcaataaaaataaaagactagatatactttctagtgtattggttttaatttcagcaattttacttttgatttatggaattgttattaattagaacgagcatttatgtcgagaaaatttattaatgttgagaaaaagtttaaactaaacttaaagtttgctaaaaggagttaaataagtggataagattaattactttttaaaagcattagtattagcaatcatgcttcgttgtacaatgaattatttacttccagcgcctgaaaagttatcttttaaacttttggatggacttatctttggtgtgttagtgtgccttttaattaattggtttattggtatttttaagaaatcttcacaaaaatagatcacgcatgtatttcgagaaaattaattgaggttaactaaacttgcagacgaatgtcggcatagcgtgagctattaagccgaccattcgacaagttttgggattgttaagggttccgaggctcaacgtcaataaagcaattggaataaagcaattttatttattgttttattttttattgtttataaatctgaatagtaaagcaacaattgccataataataactaagataaacatgctgacattgattgtagttttaatttgtccattggttacgaatattgaattaatgattatagtcaaagaaatgatgattaatagaattgtaaaaaaattgtatagtttattcatattttattaaaccttttttatattttttaactcactcagaaatgggggggtttttgttttttagaaacgagttgaaaacgagtttcttcttgtcttgatattatatagaaataatacagagttgaaaaagaaatgtaaatatgatttattaaattttataatataaaagtaagcgttttctatttacatttagagccttttataagacaatgaatgcagctactgaaatttactactcaaaatcgagtatcctttaataaactgactgtatcccttgggtgcagtcttttttatttataacttgtcaaaactttacatttcatataataacaaacgtacttaaaattccgcttgtaatcagtaccttaaaatagggaagtggtttaacctgttcagtggacttattactattttttaatatccccaaatttgaggatattagtttattgctcaatctaaatgtactgagtaaatatactttctcagctcaaaagtagctcagtaatataagtccatttactgaaaccaaatttgggctaagtaaatatattgaaagttgtatttcgcttctaaaagctgatacgtcaagttagcgtatcagagatttaaatataagcttattaatcaattcaatagctaacgcactaagttagtgcattagaaaacgaaaatattcgttctctaaaattaagattaatacagccgaaatgtcggctcaatagaatataaacagaaaaccgaaatgttggttatctaattctgaaaaggcatttgtggcttttctgcgtagtcaaaatggcaacgtagcatacatttatgatgtatgatctcatggcgcaaatgtgcgcagtgaatttcacagtccaaatctgaacagtgaaactattaaaatacaaataatacaatgatatgctaatgtaaagttaaaaaggggtattagcaatggcaaaagctttaatgttaatcataactattgtttgtatagcttatattgtgtataacttcattaaagataaaccagtcattaatattttctttgctttaataatacaatcaattttattatttctaatccgcttcttttggataaatcaatcttttaataaatcacttttatcgtcttttgacttatttacgattacggttgtagttatttatttgatatataaattaagtagaagaaaagaaaaaggggataattaattactgatagctgcgtactcaacttgagtacgcagcttataaatgacctagtaataaatttcattccccaaatttggggagtgagaatgtaaaaaaattatagatactgtaaaaattgtagacaatgaataaattcaatgcctataatgatattagaagttgttcccttatgaagcacttctatattatatttttctatatgtgagtcatttttcttggctatgtccattgggcatagctttttattttattgtagacaaatatataaataatgagataatagtaaaagaggtttaatgacttctaaaatccttatatacctagagtttttactctacttcgacgacataggagctagccttaattggttagcttcttttttgcgtaaaaaagcactctcaacttagcttatgacggactaagtgagagtgtagatgaaaagtaaggagtgaaacatttttattataatagtgtggctaaataaaaattagtgtgtaataatgataattgagattgtctaactggcgactctttcctttccactaagtatttcttctccatcgaaaatactgtatatttaggcaatctcgacactttaaaagctttcataatagcataactctttaggggcgtaaagcccctttttgtatgcgaaaaagtctcactagtacatgactagtaagactaagtttcaatgaaagcaatgttaactataagttactttaacatacatctacttcacttaatagacatacattttattatacgcttccgtaaccattcgtgacggtagctgcatgaacaattcgttcagtcatgtataaaagggagtagcaaaacacgactccctttatcagttgatctaagtaaggactgaacgaaacgttaccctcttattcatgaggtcgtgaaacgctaccccatagatgagtgaacaaaacgttcccccatgtgtcgcaacttgcgacgttaggtaagtaaatgtagcaaccgcttcgatacataggcacatttccaatttagacatgtgttaatacacgggtgcagtcctaatttgggattgcagcattaaccagcttgtcgatttaacaatgtggttattaataaatattacgtgtcaataattttaaatgcacttgacaaaatttgagtgaatgtatagtaaaaagcataaaaatgacttattataataataagagttattaaacgtaacacatcttaagaaatacgcagaaatttaaacgctgtttttgtgtatgaaatatagaaattataaacacagtgacagcgtaaaaatcgctgttatttttatgtttaatatgatgtgttgataatggaggagattaaagtgctagctacaaatattccaaagtatacccaaaatgaattagtagcactaattaatgagagaaagataaatttaactaatgaaggatacgatgatttagcaacagctattgaggggaattttatctttgacaaaaaactctttttacaatgtgctgaaattctagatatcgacaaaaaagaaatttttgatgtagagagtatttctgatgtaagctttagaggtactggatcagaaaaggatattaaaaatatcattaaattgtttgaaattatggtacagcaaagtaagttaagaggtaatataaatgtctaaaaaacataaaatttctaaatctcgaaagaaagaacttgaaaatgaagttactgaaacagtaagaaaatttaaagaagactatcctcatataaaaagtcccattgaaaactcttatttaactattgagaacatgggattttttattataggaaaaaaattagataatgatatatctggcttccatttaaatataggcgattataagtgcatttttataaatagaaatcatcactatgctagacaaaaccaatcactatggcatgaaatatatcattggtacactaacgatataggccatataagttctaaaaatgctattgaatatgaagaaatggagtataaagcagataattttgcatctaaaattcttatagacagaaataatttaaaaaatgtaattttatcatccaatataaatattaaatttataagaaagagggaaattgttcaattacagaattattatagagcttcttatatgaatgtagctagagctttatatgaggtttaccctaatgagtttaatcgtaacagaatgaatttaggtcaaagaaataatcatgaaaaacttattgcattttgtaaagaggaaagtttagattattcaatatacgatatacctaaatccgattacatatctagttcttttatagaagatttaaagcaaaattatatagataacaaaataacattagattatttagaaagtattcttaacctcatagatgaggagttgaatattattgaatgagattaaatgtgtatgtgacgcaaatatatggatagatgcatgtcattgtgacgcagaggtggattacttaaacgaatatagtgtagttggttttgctgaacaagtgcataatgaaatagtgaaatttcaaagtaataacgataagttttcatacatatataataaatatgttgctaatcaaacttcttatgaaattttaaaaactagcgatttaggagacatggaagctcattttagacatgagttaagtctcaaaggctttacagatatagataatagtcaaaagaacataaagaatcttggtgaatacgcttctttatattttgcgtattatttaaaaatccctttaattcacagtactgatcttgattttattcaacaagaaaaagaaagaatgccagatatagaaattatcacttggaatgaaatatgcgagaaaatttcatatgatgacgatgataggcttaaaaagaataaaattatagagaaaaagaaacaagaaatgaataaaaagaaacaggaaattgatagtagtaaaaaacagtttcttgaaaaaaaattagagaaattagtaagtgcgactaacgcaaaaaggaataaataaaaaaattaaacattaaagaattagcacacggacaagttgaataattcgtttcaaacgtcacttacaaagtggcgttttttattttgaatacgttatttaaaaatatacattaaacatgagtaaaaataatgatatgaaaagctaaaataacaatgtttataaatcgttataaatatatataaaatatacttattgttggagagtcattgtgccggaatataaataacttataaaaacaagctggaaacgttatgactacgtggtttctagcttgttatttttcattttagatcaacttttggggagcatataaaaaagtgagttggcttcttttttgcataaaaaaccactcttaacatagcttatgtcgaactaagtaagagtggtgacgtaaaataaataaggagcaaaatattataacaaaatattctgctaattaaattataccctttacaaataaagataaacatttttttatcattttaataattaattagatttaaatgtaaaaaatattattttttatttcaatagtatagataattaaattttattatgtaataataagtaatgagattacctaaatgacaacccttgacttagtgtttttcttctattacaaataccatatacctaataccattattacttaggtaatctcaacatttgaaattcatttaaatgatatagatctttaggggcataaagctcctttttttatgcgaaaaaaagcctcactcgtacacgactagtaagactaagtttcaatgaaagtaatgctaactatgatgttgctctatttgattaccttaatccaatttttatccgtgatttggatcatcttagagtaattaatacgatatatatttgattcaagtatcatcaagagaccaataataaaataaagtaaattgaaaaagtggaaagacaactttaaatgatgtctttccactttgttgagaatagaaaatataaggaattagatatttaaataatgtgaagaaataaaattaatgagataccccattaatgctaatataccaagtgatacaaataatgcagaaaatcctctgctaattgttttataagcgagtccttcattttctgctaagaagaaacttaatataaataatccaattccgattccgaataaaataaaaataacgattaacatgaatatatcctttcatttttagtaatgatatgatgaatatcattgttaaaattactcaatagcatatcacaaagatattttatagaattttatatttttttagtgaagattataatcaccgtattatctattaattaaaccacttatagatataaaagcaataaggcaaattttttgttatttttcaatacatctttctcatttttttgggaacttgatgaataatttggacttctaggcaacatttaatatgaaataatagggaaatcaagacattttagcatgaattatatcaacttaggcagaaatatcccatcaattaaaatatgtactaaactattagttgtaaacatatttaaggagatgaaaaccatgttagatatctttaatttcattaaaaaagtatatgatttagtaagtggtattcttgtaaatggtgaaccgagaaattaattaattgtttccccctaatcgaattgaatatatattttcattaaatactagtaaagcacgctttttatttagatatagttactaaataagaagcgtgtttcttaatatataatttaaattatagcgaattaacatttaggtattaaaagtaaacaattaaggaattgtgcacaattttttaatcgtttatgataaagttgaaacacattaaataagaggtgatgataatgactgaagttaaatattcaaacaatgaaattgaaacattttctgattttcataagaaaaaacatcgtgatacatgttgtatagcacctaaaattaaatatcatgaagataaatttgtattttctccagtttctgacgatactgaaacatcaaatattaaaacatttattacagaatgcaaaaactgtggaaaagtagaattttttaatatagcacctgtaaggttataaatatataatgaaatggaatgttgacacgtatcaacttgttgtagacaataaaaatgaagcgatgtatgatattcttagagactattcccttacacatagtctcattcccgttgaggcatagtaatgccaacgttattcaaaactagttttatattattcttagttgagtcatgcctagagaggtatggctttttttataaacttatgctaagcagttcttttattatacttaaaagaacaatgtatattacaatgaaatataaaataaggagtgtatatataaatggaatggatattatttgataaagatggtacattaatcgaatttgatcatagttgggaaaaaattggcgtacgcttggtaaatagtttcctagagacatttcctgtagcgaataaagaagcaacgcttcgcaaattaggcgttgttaaagatacgattagtccggattctgttatgggttcaggatcgttagatgaaattgttcatgcatttaatgacgaatcaggtaaagatgtttctaaatggacgcgtgatacaagtcaaacattaatagatagccgtgaaccagaaaacaactggatagatggcgtttatgatatgattcaatcattacgacatgaaggctataaaattggtattgtgactagtgactctgaaaaaggggtgacacaatttttagaagaaacacattctaaagatgcgtttgatttagtcatttctactgaagcgcatgcggctgaaaaacccaatcctgaagtactgaagccactttttgatcattatgatgttaaaccggaagatgtagccattgtaggtgacacaaataatgatatgaagactaaagtgaatgcaaagttaggtttagccattggtgtattaagtggtatcgcaaaaaaagaggaacttgtggatgctgattacgtgattgaaacagctgtgagtgtaccagaagtattaaaaaaatatacacaaagtaattaaacacaaagtgattaaagtatcaattgttattttctacatttataacatattggcagccaaggactgaattaaaaatgtgtttataccaattttttaattctagtccttcttgcctagatgagacagtaaagtctgtctctctttttttatcgatgatcgacatttcgatatgtttgaataatatgtgcaattttgtcgataattggatctaaagagtcgggattttcatgaatatcatattcattaatgttcactcttactacgggacaagcattaaaattgttaatccaattttcatagcgtttaaataactttttccaatataccggatcagtattcatttccatatcgcggccacgttgatgaatacggtcgattacttcatcataatcacaatctaaataaattaaaacgtctggtttagggaaatagggtgtcataaccattgcttcaaataactccgagtaagttttaaaatcttctttactcattgttccttgttcttcatgcatttttgcgaaaatatcaacatcttcataaatagaacgatcttgtataaagcctcctccgtattcaaacatgcgtttttgttctttaaaacgttcagctaaaaaataaatttgcagatggaaactccaacgttcaaaatcattatagaatttatctaagtaggggttatggtctacattttcaaaggaagttctgaaattgagtttatcagcaagcgcttgagttaatgtagattttcctacgcctaccgttccagcaattgtaataattgcattttgagggataccgtaattattcatattttatatctcctatcatgggtttaatttggtttaaaatcaattgataatctgattcattttgtacaaaatctaaatcagaagtgtcgattaaaatcacattagcaccttcgttttttaatgtttcataaaatgataaataatccttttttaaattaagtaagtagctatcttcaatttgatgttcaaagctacggttacgtttagcaatgcgacgtttcagtacatctaaatcagcatctaaaaagataatcatattaggtaattcaagatcttcagttaaaatattgaaaatacgattgaatttatcaaattctgattcgttaagtgtattgcgcgcaaatattctatttttataaatatggtaatcacttaccacaccttgattaatttttgcaatatcttgtgcttgtttataacgattacaaaggaagaacatttcagtttgaaaactccattttgaaatatcatcataaaaatcagaaagaaaggggttttcattaatgatttcattttcttcataataattaaaggtttggctaattttatgagtaagagacgatttgccaacgccaatcggaccttctattgcaataaatggtttattcataattacatctccaaatgttaaaatagacattgagtattttatcataagtaagggatgacacatatgacaaatgatgaattttacatgaaatgtgcaattgaagaagcgaaaaaggctcgacagcttggtgaagttccaatcggagcagtgatcgttaaagataatgacattatttcacgtgcccataatttaagagaaaccctgcaacagcctactgctcatgctgaacacttagcaatagaacgggcagctaaagtcataggaagttggcgtttagaagattgtacattatatgtcacattagaaccctgtgtcatgtgtgctggaacggttgtaatgagtcgtataccacgagttgtatatggtgcgatggatcctaaaggaggatgcagtggcagtttaatggatttactacaacagccacaatttaatcatcgtgcaattgttgaacagggtgtgttagaagaagcgtgtagcaatttattgaaacaatttttccgtgatttaagagctaaaaaagttaaaagaaactcatcaccgtacaaaagatgataaatttgttagaataggaacggtaaaacaaatttaaattttgtaattgtgttcactgaatatgtatgttctaaaatataatagctgtaagtttagctaatgaaatgaggtaacggcatgattaaactgattgcaacagatatggatgggacactgttaaatgcagcacatgaaatttcagaagaaaatattaatgcgattaaatatgctcaatcaaaagggattacagtagttattgcaacgggtcgtgcgttttatgaagcaagcacacccatggctgaaacagatttaaaaatgccttatatttgtttaaatggtgcagaagtacgtgatgaatcattcaatattatgaatacctctcatttaaatcatgaattagtagaacgaattaaagcgattcttgatcgggaagacgtgtactaccaagtgtatacgaatagagggatttatacagaagatccaacacgtgatttagatatctatttagatattgcaagaaatgcaggccaacaaggcgatgttgaaaagattaaagcagggattcaaaaacgtatagataacgggacactcaaaattgtcgataattacaaggatattgaagatattccgggcgaactgataatgaaagtactggcgtttaatccagatcttgaaaaaattgaacgtattggaaaagaattatcggccatatcaagtcttgctgtttcatcatcatcacgtggtaatttagaaattacgcattcagatgctcaaaaaggaattgcattagaaactattgctaatcaacttcatattgacttacaagatgtcatggcgttaggtgataatttaaacgatgtatccatgcttgaacgcgtaggctatcctgttgcgatggacaatgcgatgcccgaagtgaaagctatagctaaattggttacagataccaatgaacatagtggtgtaggtaaagcaattatgaaagttttaactgaagagaaataaataatatttaagaggtgttagaacgaaatgaaaggacttatcgtagtaggaagtgcacaagtaggttcacataccaatgcactagctaaatatttaacaggacaattcgataatcatgatgtcgacgtagatatttttgatttagctgaaagaccattaaatcaacttgatttttcaggaacaacacattcaacagaagaaattaaagcgaatacaaaagagttccaggacaaagcaatggaagcggatttcctaatttttggtacgccaaattatcatggttcatattcaggcattttaaaaaatgcgttagatcacattaatatggattatgtcaaaatgaaaccagtgggcttaattggtaacagtggcggtatcgtaagttcagaaccactctcacatttacgtgtcattgttcgtagtttattaggtattgctgtacctacacaaattgcaacacacgattcggactatgcaaaattagaagatggtacactgtatttaaatgacgaagaattccaattacgcgcaaaattatttgtcgatcaaattgtatcatttgtaaataacagtccgtacgaacatttaaaataaattataataatgttaaaaaacacatttataaaggaagaaacgagtttaaagagcgatagatatcgctctttttttatttttttagtaaattaaataaaaaaagtattaatatttttttaataattattagtatcaatgaagacgtttattttctgaagtttctgatattcttcaaaaatatatgtattgtcaatataatattaaaatgatatatttttgttggagtattgtactcaattaatttggaaaataggggtgtgagttatttgaaaaagaaaccaaatcgaagattagatttcttacctaatgttcaaaacaaatactcaattagaaaatttacagtaggggcggcatctattttagtaggtgcaacattaatctttggggcagggcaggaagaagcaaaagctgccgaatcagatcaaacagtaacaaatcaagataatacatcttcaactactgatacaacggaacaaccatcaacagaagaaaaagcaacaagtgaaaacataacaacagatgaatcatcatcagaagaaaaagcggctgaaagtactcaaacagataaatcatcagcagaagaaaaagaagtaagtgaaagcgcaacaacagatcaacaatcaacagaaactaaagaagtaagtgacaacacagaaacaagccaacaatcatcacaaaaagaaaaagaaataagtgaaagcactacaacggaacaaccatcaccagaagaaaaagcgacagatgaaagtactcaaacagatgaatcatcagcagaagaaaaagcggcagatgaaagtactcaaacagatgaatcatcatcagaagaaaaagtgacagatgaaagtactcaaacagatgaatcatcagcagaagaaaaagcggcagatgaaagtactcaaacagatgaatcatcagcagaagaaaaagcggcagatgaaagtactcaaacagatgaatcatcatcagaagaaaaagcggctgaaagtactcaaacagatgaatcatcagcagaagaaaaagcggcggctgaaagtactcaaacagatgaatcatcatcagaagaaaaagaagcaaatgacagtacagaaacaaaccaaccatcattagacaaacatgaaacaactagtgatgttattgagcaacctgaagctagtgcttcaattcaaaccatctctgaagagttaaatgtatcaagtgatgatacagttcaagctctagaaaatattggagtagatacttctaatgcatcagaagtggaagctattgctgcacttattcaaaatgattatgccaataatagcaacgaaacaccagttgctacaccattaaacgtaaattcagcaactacacgtaatgaagaaacaacaaatacactaagaccaagattatttgctgctatggcacttgctgctgatacgccaacaaacgataatgttgcaagtactgataacaatagaatcattgaagctgatgcaattgcaaatggttatattaattcagctacagacgcaacgaatgctgcaaatacactatctggacgcgcatgggttgtagataacaatacaggtacgccggcaactatgtcgaatggtttatcaccagttccagaaggtacatcagtgtatatgcaatggattgataaagatggagtaacatctccaatctataaagcatcaactacaaactcattaggtaaatcagaagcctcacaagtaggccctggtgcatatgcatttgatttaagaacaccatatgtcgatgctaacgggaaagaacacaagtatcgagcagtagatggacaatactatcgtatctggattgaagattataaaactcaaaatggtaatacagcaacaatgctgcgtacggcaggtggtttcttaccaggttcatatgtaaattcagttactggtaataatattggtcagttcccactaataggtacaaatatgcaacgtacaggtatttttatgggtgttgaacctgatggtgaatatatgactcgaccaaaatctgattggattcatgatactcaaggtgctgacagaccactttcaactaattctatccatggtcgtgtatggctagaaacaggaactggtggagattcagctaactcagcgactggtccaaattataactcctcgcttggaagtgatagaatagcagatggttatactgttgtattttcatctttaactgatgaaggtgttcaagcatataaaaatcaagtagaaagtttacctaaagcagaacaagcagacgcaacaaaaacattattaacagatcatcccgaatatatatcagcaacggtctatggtgagacaaatgcggatggatattatactcttcacttcccaacagatacaaaaattaataatgattatatttatggctatgtaatgaatccgaatggagaaaatgtattaggatattctaactatatatcaccagtatttaatccagcatggcaaattggttcatcatttactcctcaaactgcaccaacgcctaaaccggctaagggtggatggtataatgtgaactttgcattagttccgacagtggacactaaaattgatattgtaaaatataataacactactcaaccagcacagcctggtgacacagttaatattgatttaagcggttcacaattatcaccacttccaactcatatagaatggagagacagcaacggtaatgtagttcaaaaaacagatgacattacttcatatactgatggtgaacaaaaaggtacattcgtggtacctaatactgcaaaagctggcgatgtttatacagtatacttagtttcaggtggtaaagatgtaggttcagattcattcgtggttgctactcaagagaaatcttatcatccaaaaacagacgaggttacaaaagattacggtaccccaacaactgagaaaaatgtaactgacgcagtaacaataccagattatccatcagaaaaagataaaccaacaatcacagtcgatgatccaagtacattaccagacggtaatacgccaggcacagtcgatgtacctgtgacagtgacatatccagatggcacagaagatcatgtgacagtaccagtgacaacaaatgaacaagcagataatgatgcttaccaaccaacaacggatgaagttacaaaagattacggtactccaacaactgaagaagatgtaactggagcagtaacaattccagattatccatcagaaaaaggtacaccaacaatcacagtcgatgatccaagtagattaccagacggtaatacaccaggaacagtcgatgtacctgtgacagtgacatatccagatggcacagaagatcatgtgacagtaccagtgacaacaaatgaacaagcagataatgatgcttaccaaccaacaacggatgaagttacaaaagattacggtactccagcaactgaagaagatgtaactggagcagtaacaattccagattatccatcagaaaaaggtacaccaacaatcacagtcgatgatccaagtagattaccagacggtaatacaccaggaacagtcgatgtacctgtgacagtgacatatccagatggcacaaaagatcacgttaaagtccctgtaacagtcggagaagaaacacaagcgaatactaatgatccaagttatgataatgtaacagtagatcctggagaaacagtcaaagtgccacaaactggtgataatacaatgccggatggcactcaatatgaaattgataaatcgaaaattccatcaggatgggaagtaacagttgaccataatactggtgaattaactgtaaaaccttcggaagatgcagtaccaggaacatctatagttataccagtgacggtaacgtatccagatggttctacagaagaagcatcaacaacgattacagtaggtgatgtgattgatattccagcgccaacggttaacccggttgatgataatgatactgaagttacgggaacagatggtacaccaggcaacacaattgtggttacattcccagatggtagtacttcagaaggcaacattgatgaggatggtaattggactgttgatattccagacggcgtagaccttgataaaggtgatgtaattactgttgttgaaaaagataaagatggtaaagtatctaccccaacaaaagttgttgtaggagaaaattgtgataatccatcaaatggagacaactcaggagatggagcaggcaatgattcatcagatggagataactcagaagacggagcagataaaggctcatcaaatgaagataattcaaaagatgaagaaggtaataactctttagatagcaataattcagttgaaggaaataaagatagtctaactgataataacgctactacagattcaaataatactgcgtctgttaacaacactgatcaaacagattcaaacaatgacgtatcagagttaaatgaagataataatacttcaaataatactcataaacaaaataatagtgaagctaaagcattacctgaaacaggtaataatgaacaaaataatggcactttacttggctctttatttgctgctgctggtacgctcttcttagcaggaaaacgtcgtaaaaatagatcagataaaaagtagtttactactacaatgaaaatagtcttcccactatttgggagggctatttttttatttttgattttggataagtaatttgtgtgagaagagttagtatttttaatataagtgtggatttagatgcgctagattagtaattcaaccgagtagtcataaaagactactaaaatgttattataatgaaaaaaacgaaaaatttttgatagaaaattttgtaacgcataatattttattaagatggaaaaataaagaatatttttgattcatcaatagatttttatgaatttttcctgaaagaagggaattttgaaactagcaattttctatttaattctttattaagagtaccttctataattaataagactggtaataatggaaaagattatttatattggcagggtgaaatagatgataatattattcgacatataatgcacaatttaaatcgacctaatagagatttaaaagtaatagttcctaatgaaaaaagatactcacaattagcatataaattagaagaacaaaagaacattgtcactaaagatggatatgtctataaattcaaaaaaataatagttattcaaatcaaattttatgtttaactaattcagatcaattattatatctagagcaacttgcacaatctaatccacagtatgattttcatattgcagctttaactactatgtctaataaattattaacacttaataaatattctaatattcatttatatcctaatgtgataaaaaagaaagttatagagttatatgaagaatgtgatatatatatagatatcaataaaggtaaagaaatattggattcagtgagagcagctttcgattataacttactaatactagcggaaaaagaaattacacataacgcagatgtaacggcacctaataatataattacttctaataatgaaaaagaattttcaagtattttaaaagaaatttataataataaagagaaatttaaaaatcgtttaatataccaacacaaacacgcaggtgcaatgtctccatcagaattcaaaaaaaaatttaaaaaataaataaccccccctatatttattcactcaatatagggggggattatttattttctatattttagtcttgcgaaagcatcgtgttgatgaatggattcttcgtttcgacattcaatgtcaaagccatcaatccagtcaaaatctactaaatctgcagcaattaaacgaattaaatcttcaacgaaacgtggattttcatatgcacgttctgttacacgtttttcatcaggacgttttaaaattggataaagaatagagcttgcatttgcttccattgcatctaaaatcttttctttgtaatcatctatcatttcagaatttttatctaaatacacttttactgttacaacaccccgttgattatgagcagagtattcgctaatttctttagagcaaggacaaagtgttgttacagtagctgtgatggtaagttctttacgcgttacttgatctttatgaattgctaaaccgtaagtaacatcagcactacctactgctttgatatgagttacaggactataacgatcaaagaaccatttacctgaaacgtctacccccgcagcattctgtttcatattgtcttgtaatgtacgtaatacttgatatagtgtatcgaaatccagttctaaaccattattataatgtttctcaacactttctaagatacgactcatgttaatacctttttcatctttatttaaacttgttgagaaactaaatgtacctgctgtttgaaattgatcaattttaacaggatatactaaatttttaatacccacttcttcaatttcaaacaagaagtttttatgtgtactttgtaagtcagtcatttcatttttagttgtaggttttgtacctttgatagggtctactgaaccgaaatgtttccagcgaccttctcgagtagataaatcaaattcagtcattcgtttattgtacctcctctaatgattttaattgtcgaaatgatacgtccaataaggttcgacttctagaaaactttgtgtttctccgccaacttcagggctagctaattgttttaagaaaggacctgtttgagatttatgagcttcaaacgcctttaatttaatctctttatattgactaatgtcatttaatatatcaggttctcctaaaatatccggtgcatcattactaaatgctacgagttgaagtcttggacgctcttctttaggcatacgtcctactgttcttacgacagcttcagctgttgcttcatggtctggatgtacggcaaattttggataaaatgaaataatcactgatggatttgtctcctcaatcaatgtttttaccatatcatccatttgctcatgtggctcaaattctactgttttatctcttaaacccattttacgtaaatcagtaataccaatcactttcatagcatcttctaattctttttcgcgaatataaggtagtgactctcttgtcgcaaaagggggattgcctaaattacgtcccatttgtcctaatgtgagacaggcataagtgacaggcaccccgttttcaatataacttgcgatcgtcccagcagatgagaaggtttcatcatcgggatgtggaaatatcattagtacatgtctttcatctttcatgaatcttcctcctctatactgtgaatggctgttcactgatttcaatcgttgcagccaactgtccttcgtaattaaatccagctattaaaaattcattattatcattgatttcatagtgagtcaggccttgtacatatacccaacctccatcacgaagtttcaacccaacacgaaatggatctttatctccgccctttagttgcgcatgttcatatgtgacttgtatatttcgtaaaaacgtacctgcattaaacacacgttgatcaaaatggttagcatatgcaccattcgtcgtttcaacatgcaaatagacaggtttgttttcaaatgtagttaataatcgttgtacttcttcagctttaatgggttccaacatgttcactccttgcaaccatacaatgtgtgtatctatctattttactaaaaagaacgactgaattgtatccctatgctcaatttatttgtaaatgaaggaaaataattcgaagtgatttaaatgtttaaaaatatttatcatgggtatctatagtactatgattatgatacgaaaggatgtttgtaatggaattacaattagcaatcgatttattaaataaagaagaagcagcaaaattagctaaaaaagttgaagagtatgtggatatcgtagaaattggtacacctatcgttattaatgaaggattaccagctgttcaacatttaaatgaaaatatcaataatgcgaaagtgttagctgatttaaaaattatggatgcagcagactatgaagtaagccaagctattaaatttggcgcagatgttgtgactatcttaggtgttgcagaagatgcttcaattaaaggtgcggttgaagaagcacataaacatggtaaacaattgttagttgatatgattgctgtacaagatttagaaaaacgtgcgaaagaattagatgaaatgggcgctgattatatcgctgttcatactggttatgatttacaagctgaaggacaatctccattagaaagcttacgtacagttaaatcagtcattaaaaattctaaagtagccgtagctggtggtattaaacctgaaacaattaaagaaattgtagcagaagaacctgacttagttattgttggtggcggtattgctaacgcagatgatcctgtagaagcagctaaacaatgtcgtgaagcgattgaaggtaaataaaatgccaacttttaacaattatcatttaattcttgaagaaatagataacacgttatcacatctagaggataatgattatggacgttttgcaaatgaagtggttggcgcatctcgtatctttacagctggtaaaggtcgctctggatatgttgctaatagctttgcaatgcgtttgaatcaactaggaaaagatgcatctgcaataggtgaagcaacaacgccatctattaaagagcatgatttattaattattatttccggttctggatcaacagagcacttaagattattagctgaaaaggcacattcagttggcgctaaaattgctttaataacaactaaaaaagaatctaaaattggcgatgtcgctgatacagtgattgctttacctgcaggaacaaaacatgaagcagaaggctctgaacagccgttaggtagtctattcgaacaatcttcactcatctttttagatagtgtcgtgattggattaatggatgcctttaatattaatgaagaagcaatgcaagacaatcatgctaatttagaataaaaaccatcactcaaatatattatcgttcagatgaatatatttgagtgatttttttatgtgttatttttcatataatgttaatataataattaatccagttaacatttagagagggtcatatgttagaaatactaaataaattaaatcactattcagtagaacaaccagatatgattgcactatcgttcgaagaagatgtattgacatatcaagaactttatacagcaatacagcaattaaaatcagtcttcatgcatttaccgaaagggtcccgagtaggattgttaagtaaaagtcctttacataatatgttgaattattttgcaatattagagcaaggaagtattccatgttttttagatgatcaatggtctgaagtaacaattcatcaactgattgaaacgtatcatattgactatcttgttgatgaacagcatagactgataaagacaacgtcttctgaaacatatccaacatatttaaatgagcagtcacaagtccatcaactattacatattggttttacatctgggacaacagggttacctaaagcatattatcgaaatgaaccatcttggcttgcgtcatacaaagaaaatgaaaagctacttcgtcataaagaaaacatacttgtagcaccgggaccacttgcacattcattgtctttatacacttgtatttatgcgttatatacagggagaacatttattggacaaacccgttttaatgcgactaagctcgttagcaaaatgaaacaacaaacaacaaatagtgcattatttcttgttccaacaatgctacatgcaataacaaaaataaatcacgatcacctacatttaacgactattttaagtagtggggcgaaactctcttcttcgttgtttaagcgtatagccgaaacatttcagcatgctaatattattgaattttttggaacgtcagaagcaagttttattagttataacattaaccgtaaagcttctgttgattcagtgggatacatatttcaaaatgtaacgattggtttagaggaaaaagacaagaatcatatagggttattaaatgtaaaaagtaatatgatattctctggatatgtaaatcaatctgtcgtattacctgaaacatggattaaaacaggcgattacgcttatattaaagataatcaattatatttagtgagtcgtcaaaatgaacgattaattattggaggtaaaaatgtttatcctcaagttattgaacaaatgataaaaaatattgatggagtagaagaagcaattgttataggagaaccgcatccacgttttggggaaatagcggttttactatatacaggatcgatagaacttgagtaccaaactgtgagacaacatattatgaaagttctatcacgatatgatgtaccttccaaattgataaaagtagacagtatgcaatatacccaaagtggcaaagttgctcgaaataaaatgcgtactgcctatgtaaaaggagactttaaatgatgaaccaaccggtcattatatgggcgaaacgtacaccttttggcaaatacggtgggaaattgaaacatttagaacccgaaacattactcatgcccttatttgaagaaatgaattcaacttttcctaaaataatacctgatatcgatgatgtagtgattggaaatatcgtaggtaatggtggaaatattgctcgtaaagccttattagaagcaggtctagctgagagtattccaggtgttacaatggaccgtcaatgtgggtcagggttagaaagtattatatatgcatgtcgaatggttcaagctggtgcaggtcatatttatatagctggaggagtagaaagcacgagtcgtgctccttggaagattaaacggcctcaatcagtgtatgatacccaattaccagaattttatgagcgtgcctcttttgcaccaaaaggtcaagatccaagtatgatagaggcagctgaaaatgttgcgcaatattatcatattacgcgtaaacaacaagatgcctttgcgatacgtagtcatcatcttacacatcaatattataagaatggaagtataagtaatgaaattgtatctttaaacatcaaaggtcatttatttgataaagatgaaagtattaagccaacacttactgaacaacgattaaatcgattacgtcctttactagctaacggaacagtaacggttggaaatagttgtatgaaaaatgacggcgctgcgcttgcactcgttatgaatcaagaaacggcattacaatacggaatatcagagggaatgatgtttacagatgcagtgacaataggtgtcaatccgaaacgactaggtattggaccagtacctgccgtaaccaaattacttaaaaaacaaaatttaaaaataagtgacattgatgcaatagaacttaatgaggcatttagttcacaagttttagcttcaattcaagagttaaaattaaatattaatcaagtcaatcagtgggggggagccattgcgtctggtcatccttatagcgcaagtggcgtagcgctaatcactagattattaaatatgacacattggaagcggggagttgctacgatggggattggaggaggaatggggaatgcgatactcttcgaacgatggagcttgtgagaaaatagaaatatattttaatgaacaagaagtaagagcgtattgcgaagtagttgaaagaacgtataaaggcgtggtgccttcactcatgtgtgcaagcgtctggccaaaatttaagttgtttcaaaagtttgaacaagaacatattcttcttatgcgaacaacatgtgaagaatttgaaccattaaaatgtagactaaaatatgaggcgtacttaacacataaaagtacgaaaaagtttaaaacatatatccaatatatctacgagttaaaaatatataaagataatagacaatgtatatttattagacaaacgtttataaaaaaggaggtaaatgatgaggtttagtcatgataaagtgagtcattaccttcgccttgttaatgataaaaatgagcttcattcaaccattgttcctggtcaactggtagtggattgtgtattagcgtattttcaaatagagtggacacaaattaacgttaagtatagaaggactatagatatagatgaagaagtgaccttcaaaaaagtgaatcataatgaaataagcgtctttggtttaaatggtgaagaaaaaatagttattactaaaaaaagtaatcatactgatttataattatttatttaatcgttgataacccatcataggtgttaaaaaagaaacaatattataaagatatagcgttaatgttagtataacttaaagtttctctctaagtttccaaaaggggacattcttggctaacattaacgctattttattagggtgagcttttgaataattaatgactttttaaagttttgagtattaggggcatcttaactttaaaaaagattttgaaatattcgtttgttttcgtattcaattacgaaaaacactttttaatttttgaaatgtgatgaataacttaattcatgttatcaacgtcactttctagtagagagagcaatttatagatgtcatttttactaaacgtttcatcgaattttaccgtaatcgtcttgaaggtctttgtaatgatttcgtatattgggataccgttttctatattttgcttgtagataatcatgttgttaattcctcctttgtctctctacacttaatatagtaatggatttgattataaaaaacatgagtctatggtactaacttttattgcaacggactgtgtagagcatactacgactaaatgcctagaagatataagaaaagcttttaatcttagtgtgaccaaactattatacacaagattaaaagctttagaagtgtttatatttctttaaaaatacagtacagacagtaactgattgaattgaaagtacgcagattagcttctttcaactctaatgctagggccccgacaaagagactttcaaaaagaaagtcgacgatgaacgcgagttagggcgtcggggaaggacaatgaaatctaattaaggattacaaaagactagtgtcttttgcataagaagtactagcatttttttcaaaaatgcagtacagacagtagctgattgaattgaaagtgcgctgattagcttctttcaactctaatgctggggccccgacaaagagactttcaaaaagaaagtcaacgatgaacgcgagttggggcgtcggggaaggacaatgaaatctaattaaggattacaaaagactagtgtcttttgcataagaagtactagcatttttttcaaaaatgcagtacttctttaaacttctttgacgtcgacgtcgatgtgttctacgcggttgtatgcgccgtgatcaactgggcctacaaagtcattcattttccaaccatttttaattgctgatgccacaaatgctttagcgctaataacagcttctttaggtgatttaccatttgccaagtaagctgttgtagctgctgcaaatgtacaacctgcaccgtggttataactttgttggaacatatcagttgttaattgataatatgtttgaccatcataatataagtcataagatttatcttgatctaatgctttaccacctttaataataatatgttgagcaccttgatcataaatgatttttgcagcttttttcatatcttcaattgacgttaatttacctaatccagataattgaccagcttcaaataaattaggtgttacgaccgttgctttaggtaataaatatttaatcattgcatctgtatttcctgggttaagtacttcgtcttcccctttacataccataactggatctactacgaaatattttgcacctgattgttcaaatgcttcgccagcacgtttaatgatttcttcagttccaagcatacctgttttaacagcatctggaccaattgaaatgactgtttctaattgtttttcgaatacatccattggaagtggtgtcacatcgtgagaccaagtttctttgtccattgttacaacagctgttaaagccaccataccgtaagtgtttagttcttgaaatgttttaaggtcggcttgcatacctgcgccagcgcttgtatcagaaccggcaattgttaatactttttttaatgccatgtattatcactcctgtcaattatttacatctttatttatcatatcatgtaactcaactattgttctagcatgaagatagtaaggcgatttatatcacgtttcaaaggggtcatatgttaaaatagaagtgaggtgaaaacgatggaatggtcagacatttttcatgacattacaacaaaacatgattttaaagcaatgcatgattttttagaaaaagaatatacgacacaaatcgtctatccagatagagaaaatatttatcaagcttttgatttaacaccatttgaagatattaaagttgttattttgggtcaagatccatatcatggacctaaccaagcacatgggttagcattttcagttcaacccaatgctaaattcccaccatctttaagaaatatgtatcaagaattagaagatgatatcggctgtcatagaacttctccacatctacaggactgggcacgtgaaggtgttctgttattaaatacggtattaactgtacgtaaaggtgaagcacattcccataaggacattggatgggaaatatttacagatgaagtcattaaagctatttcagattatcgcgaagatgttgtctttatcttatggggaaaacctgcgcagcaaaagataaaattaattgatacagcaaagcatcatatcattaaatctgttcatccaagtccattatctgcttatcgaggtttctttgggtctaaaccttattctcgtacaaatgattatttagaatctaaaggtaaaacgccaatacaatggtgtgaaagtggggaatcttaattgaacaaagaacaattaattcaacttatagaacaagaattagtgcaagcagaggaagctcaagatgaacaacagtttgaaaagcatatgtatgcgattcatactttaacatctctttattccgatgtttcaaaacgaccttctaaaaaatcaaaacatgattttactaatattgtaacttctgaatcttcgttttcaaataagccttcaaatcattcagcgattactgctgcagaaattgaagcgatgggtggtaaagttccacaaacaatgaagcatcaaactaaatcgtctaatatgatggtgacggatgatgaaattggaaatggtgaatcaatatttgatttttaattaaaattaagttaggagaactaaaatattatgatgaaagtatttataattttaggtgcattgtgtacgatgatgtctgttggtacgggcgcatttggtgcacatggacttgaaggaaaactctctgataaatatatgtcagtatgggaaaaagcagtgaattatcaaatgtatcatggtctaggattaattatgattggcatcattagtggtacaacttctattaatgtgaattgggcaggatggcttctgttctttggtattgttctatttagtggctcattatatattcttgcattgactcaaattcgtattttaggagcgattacaccaatagggggcgtactctttattgtgggatggttaatgttaattattgcaacatttaaatttgctggataataatattttatattttggttagtaaactcacctttttgggtatattaagtacctgaggtgagtttattttatgaataataaaaatcgagagatagatagaggagatttaaaacaaaatctctctgaaaaatttgtttgggcgattgcttatggctcgtgtatcggatggggagcatttatactacccggtgattggattaaacaatcaggtccgattgcttcatctattggtattgtcattggtgctttattgatgatattaattgctgtaagttatggcgcattagtcgaacgttttcctgtgtcaggcggtgcattcgcgtttagttatttaagttttggaagatatgtgagtttcttttcatcatggttcttaacattcggttatgtttgtgtagtagcgttaaatgcgacagcatttagtttattaattaagtttttactgccaaacattttgaataatggaaggttatatacgattgctggatgggatgtttacataacagaaatagttattgctacggtattattattagtatttatgtttattgcaattcgtggtgcaagtgtttctggtacactccaatattatttttgtatagcaatggtcattgttgttgtgcttatgtttgtaggttcatttttcggaaataacttttcgttaagtaacttacaacctttagcaagtaaagaacttggatggtttaattccattattatgattgtagctattgcaccatgggcttatgtgggatttgataatattccacaaacagcagaagagtttaatttctcgccaaataaaacgttcaaactgattgtatacagtttattagcggcagctttaacttatgtcattatgattttatacacagggtggttgggtacgaataatgcgaattttaacggaaatttatggttaacaggcgctgaaacacaaactgcttttggttatattggtttaggagtattagcgattgctattattatggggatttttactggattaaacggattcttaatgagttcaagtcgattactattctcaatgggacgtgctggtatcatgcctaaagcgtttagtaaattacatccaaaatataaaacaccctatgtagccattatctttttagtagctattactttaattgcgccatggttaggacgtaccgcattaacatggattgttgatatgtcttcaacaggtgtatctattgcttattttattacttgtttatctgctgctaagctatttagttacaataaacaaagtaacacgtatggtcctatttataagacctttgctattttgggttctattgtttcatttatctttttacttttattattagttccaggatcaccagcttcactttcaatgccttcatatattgcattgggtagttggttagtgattggtcttattttctttgtagttcgataccctaaattaaaaaatatgaataatgacgaattaagtcgtctgattttaaatcaatcagaacgagaagttaaagaaatgatacaagataaaaaataatatacgtaaacgcgagagatgagggttaattaccaacaatctctcgcgttttattgttatatacgtttacgtcgtcgagcgaaaccagaaacgatgatttttgaaatttggtctgcaaataataatcctaatgcaatcgcaccagcgataagtgtgacttcgagcattgtgttgattgctttaccaaattgtaataagactagatttttagttgcatcaaaagcaagtccaccaggaactaatggaataataccagtaaccatgaaaatgattgcaggttcacgttttttacgagccatgtaatgactgattaaacccaatgtaaagctaccgaaaaaacttgaataaatcgtatgtatattcaaaccttggtagaataaaatatataccatccatccacaagctccaacaaaaccacatgataaatacagctttctaggagcgtcaaagatgacacagaaaaagagagaagctgtataactaaatataaaattaaataaccaaaacatttatgcgtactcctaaactaatattaatatcgaacctacgccggcaccaataccaaatgcggtgacaagtgcttctaaagacttagtggtaaacatcatcatatgaccaccaaataaatcttgtatagcattcgtaatcagtactccaggtacaataggcatgactgcagcaataataatagtagctaaatcaccacttggcgctaaccaatgaccgaatactgcgataataccaataactaaggatccgacgaattctggaataaattgtgcgtgtaatcgacgatctagaatttcaacaaccagatacccaatactacctgcaagtagagcagtaatcacatcgataaattggccaccttgcaaatataggaaactaattgcaataatggcagcagcaatccctttaaatgttaagctactatctcgttttgcaatatatattttttctaatcgctcttttgcatcttctaaagagatatccccttttgtgattaatcgtgatatttcatttgcttgtgaaattttaatgagattagtatcacgggaattaattctaaatattcgggggtaagattcgttatgtaaagtaaattgaatgactgtatttgtaacgaagctattgctttcaggatatcctagttttcgggcaatacgtgtcatcgtatcttctacacgtgttccttccgcgccagattcaagtaatatacgtccagccatcatgacgacgtctttgattaaagtttcatctatatgttcttgtttatttgtattttccatttcatcaccattcgttaagatgtaatcattattatagtagaagtacatgaaaataactaccttacattataaaacttaacaatcataatatgattaccattatacctcaatagtaggtaaatatattttaatgaaaataaaatttaatgttaaaaaacaattaatttataacaataatgtttcagaacattacaattcggttaaataataatagttaacaagtcaaaattgtgctgggtagcgacagcacttttgtgatttgttaatgttcagagtagtaatgaagttctcccaaaccatactacttgaagtacactttgtaaaaagtgtactttatctcggaaactaattgttttatataaatatattaatttattgaaaaatggagcaaagactggcgtttactatgctagtctttgctccatttatatattaaattgcaaaaaattgatcgaaatgatcagtagttaaaatatggccgatatagaaactaccaaagtcgccatagcgagcagtcgtttcatcaaaacgcatttcataaacaattttcttgaattgtagaacatcatctgagaataatgtgacgccccattcaaaatcatcaaaacctactgaaccagtaataaattgtttaattttaccagcgaatttgcgtccaatcataccatggttatacattagttttttacgatcttccattggtaacatataccagttatatgtttcattacgacgtttatccattggatagaaacaaatatattctgttctaggcaattctggatataatcttgctttaatatgtggattttcataaggatcttcgtctgatttaccggctaaatagttacctaactcaatcacagatacatatgaataagtttgaatgaagaaatcagcaattcttaatttatttaattcattttcaatttcattcaattctttcatttctggacgtaaataccataataaaatatctgctttttgacctgtaatattatataaagcataatctccagcttgtttttctctggcagtggctttatttttgataaatactttaaattcattaatcattgcttcgcgctcatcttctggcaccaatctaaaagttgcccaatcgacagcgtaaaataaatgaaggctataccaaccatctaatgtttcagctgcttcactcatatctatcgctcctttaactatattttctatcaatacagattaaattttatcataaagagaattgtcacacatacttaaaagattacaaattaatgaaatagaaatattaaaagaaataaagtataattaaggtgaaaatactattatttaaaaaatttgaggagggcattatgtctagtttattagatgtattacaagaaaaactttcaggaaaaaacgttagaattgtattaccggaaggtgaagatgaacgagtattaacagcagctacaaagttacaagcaactgactatgttacacctttagtattaggtaatgaagaaaaagtaaatactttagctcaagataaaggattagatatctctaatattcaaattatcgatccttctaaaagtgatttgaaacctgaattagtcaaatctttcgtagaacgtcgtaaaggtaaagctactgaagaacaagctcaagaattattaaacaatgttaactattttggaacaatgttagtatacgctggtcatgctgatggattagtaagtggtgctgcacattcaactggagatactgtccgtcctgccttacaaattattaaaacaaaacctggcgtatctagaacatctggtatcttctttatgattaaagaagataaacaatatatatttggtgattgtgctatcaatccaacattagaatcttctgatttagcagaaattgccgtagaaagtgcaaaatcagcaaaaagttttggtatggatccacgtgttgctatgttaagtttctcaactaaaggttcagctaaatcagatgatgtagaaaaagtcgctaacgcagtaaaattagcacaagaaaaagtggaatctgaaggtttagataatgtagtggttgatggagaatttcaatttgatgctgcgattgtacctgcagttgcagagaaaaaagcacctggagcaaaaattcaaggtgacgcaaatgtatttgtattcccaagtttagaagcaggtaatattggctacaaaattgcacaacgtttaggtggatttgaagcgattggtccagttttacaaggtcttaattcacctgtaaatgatttatctcgtggttgttctactgaagacgtttataacttatcaattattactgctgctcaaacattacaataatggatttagcgagtaagtattttaatgacattcattggcgctatatagaccattcttcaggtttagcgccaatgcagtcatttgcatttgatgacacgttttcagaaagtgtaggaaaagatatatcttgtaacgttgtaagaacatggattcaccaacacactgtcattttaggtatacatgattcacgtttgccatttttaaaagacggtattcaatacttaactgacgagatcggttataatgcaatcgttagaaattctggtggtcttggggttgtattagaccaaggtgttttaaatatttcgcttatttttaaaggacaaactgagacaaccattgatgaagcattcacagtgatgtatttacttatttgtaaaatgttcgaaaatgaaaatgtagatatagatactaaagaaatagaacattcatattgtcctggaagatttgatctaagtattgatggaaaaaaatttgctggtatttcacaacgacgggtacgtggaggtattgcagttcaaatttatttatgtgttgaaggctctggtgaagaaagagctgaaatgatgcatgaattttatcaacgtgccttgaaaggtgaagttacaaaatttaaatatccggatattaaaccagaatgtatggcatctttggagacattacttcatcgagacattaaagttcaagatgtgatgttccaattactttatgcgattaaagacttaggtggtcagctaaatatggatccaattacagaggatgagtggcaacgttatgaaggatatttcgataaaatgattgaacgtaatgagaaaatgaatcgttccttagattaaaataagataaaagggagtaagaaaaattctaagtgaattttagcttactccctttttagcatgcaatcatacaactaaagtatatatttaccttcaaaaatataaaaattgctacattcttattattttttatagtaatatagatgaggtggattcatttaagaacgataatttaaccataattatgttgattataacattttttaggatataaatatttcaaagttttgaactatttttgacaaagttttatactatttattgatgtattaacacaaatgcaagatttgaagtaaatgagtataaacatatgtgtgacatgacatgtacaaatgtataaatacgttcaattttaaaacaacattaatgaatgttgaaatcattttagaaagaatattaaaggtgagagatcatggtacgacgtggctatggggaatctaacggaaaaattatattgattggtgagcatgctgtaacttttggccagccagcaatcgccattccatttacttcaggaaaagtaaaagtacttattgaaagcttagaaaaaggtaattattcagcaattcagagtgatgtttatgatgggcctttatacgatgcacctgatcatttaaaatcacttattacacattttgtagaaagcaaacatgttgaagaaccattgttgattaaaattcaagctaatttaccaccttctcgaggtttaggttcaagtgcagcagtagcagtagcttttataagagcaagttatgattatttagaattgccgctatctgatgaagagttactagaaaatgcagactgggctgaacgcattgctcatggtaaaccaagtggtattgatacaaaaacgattgtaacgaatcaacctgtttggtatcaaaaaggagaagtggaaattttaaaatcccttgatttagatggctatatggttgttattgatacaggagttaaaggctctacaaaacaagcagttgaagatgtacatcgtttatgtgataacgatgagtcatatatgaatgtcattgaacatattggctctcttgtttatttagctagtgatgcaattaaccatcacagctttgatcagcttgctaatatatttaatcaatgtcaagacgatttaagaacattgacagtcagtcatgataaaatcgaaacattactcgaaattggaagacaacatggtgcagtagctgggaaattaactggcggtggacgaggaggtagcatgttaattctaactaaagaagaagtgactgctaaaactattgttgcagcagccgaaaaagctggagcgcaacatacttggattgaaaagttaggaggataaatctttgaaaaaaagtggtaaagcacgcgctcatacgaatattgctctaataaaatattggggaaaagcagatgaagatctaattattcctatgaataatagtttatcagtgacattagagcgtttctatacagaaacacgtgtaacgtttgatgcttcattaacagaagatcaacttattttaaataaggaagctgttaacgctaaagaaagcgccaaaattcaacgttatatggatatgattcgaaaagaagctggtatttcaacgtatgcactcatagaaagtgataattttgtacctactgctgccggtttagcttcttcagctagtgcatatgcagctttagctggtgcttgcaatgaagcgcttgatttaaacctatcagataaagatttatctcgtcttgctcgtcgtggttctggatcagcatcaagaagtatttatggtggttttgctgaatgggaaaaaggctatgatgataaaacgtcttacgcccatcaaattgagtcagatggtttcgagaatgacttagctatgatttttgtagttattaacaataaatcaaagaaagtatcaagtcgttcaggtatgtctttaactcgtgagacttcacgtttttatcaatactggttagatcatgtagaggaagatttaaaagtcacaaaacaagcgattgcccaaaaagattttaaacgaatgggtgaagtgattgaggcaaacggtttgagaatgcacgcaacaaatttaggtgcacagccaccatttacatatcttgtgccagaaagctacgaagctatgcgaattgtacatgaatgtagagaagcaggattaccttgttattttactatggatgcaggaccaaatgtaaaagttctaatagaaaagaaacatcaacaagcgattgtgaatcaatttttagaagtatttaataaagatcaaattataacaagtgatattacacacgcaggagtcgaaataattaagtagggaagagatataatgattcaggcaaaagcgccaggaaaactttatatagcgggcgaatatgctgtaaccgaacctggatataaatcagtgttaattgcagtagatcgttttgtcacggctgctatcgaagcttcaaatgaaatcacaggtacgattcattctaaaacattacactatgaacctgtcacatttaatcgtaatgaagataaaatagaaatatcagatgtacatgcagcgaatcaactgaaatatgtagttactgctattgaagtgtttgagcagtatgcgaaaagttgtaatataagattaaaacattttcatcttactattgatagtaatcttgcagatgcatcaggacaaaagtatggtttaggttctagtgctgcagttttagtatctgtgattaaggttctaaatgaattttatgaaatggagttatccaatctttatatttataagcttgcggttatttcaaatatgagattacaaagtttaagttcatgcggagatattgctgttagtgtttatagtggatggcttgcctatagtacgtttgatcacgaatgggtaaaacaacaaatgaaagaaacatctgtagatgaagtattagaaaaaaactggccaggtcttcatatagaacctttacaagcgcctgaaaatatggaagttctcataggatggaccggttctcctgcttcgtcacctcacttagtaagcgaagtcaagcgtttaaaatctgaccctattttttatggtaagtttcttgatcaatcaaatacgtgtgtggaaaatttaatctatgcttttaaaacgaataatataaaaggtgtacaaaaaatgattcgtcaaaatcgtagtattattcagcaaatggataaagaggctacggttgatattgaaacaaaaaaattaaaattattatgtgatattggtgaacgttttggtggtgcagcaaaaacttctggagctggtggaggagattgtggcattacaattatcgataatagagttgataagcactctatttatgaagtatgggaaaaagagggaattaaacctttgaaatttaaaatatatcacggacaataagactactattatgatgaagcgagacattttattaagaaaatatatgtcttgctttttatttatagcaaatcttttttagtgcttgaatttttaattaaaaagagtaaaataattagagttgtaataaatgaatggaagtcaatatgagagaaaataatgtaaaggtgggtagcgaagtgaagaataaatttttgatttgtgacgaatgtcaggcagttaacttaaaatcattaaagaaaaaattagaaaaattagatcctgatgctgaaattgaaataggctgtcagtcatactgtggtccaggtcgtcgtaagacatttgcttttgttaataatcgcccacttgctgcattgactgaagatgaacttatggaaaaagtgactgcacaattaaaaaaaccacgtgatcctgaagaagaagaacgtttgagaaaacgtaatgaagaacgtaagcgtcgtaaagaagaacaagatagaaaattaaaagaaaaattagcaaagcgtaaagcaaataaataataaatatcgatgataaagaagctcgtaaactcatttaaaaatgggtttacgagcttttttattaaatattaaataagtcattaaatgattcagctattgttggatgagtataaatattatcgcgtaatacttgataaggaatatgttgatcgatagcaagtttaattaaattaataatttcttcagaacctttaccatataaagtagcacctaatatttcattattatctttattgattacaactttgaaaagaccgcgaccatcgttattaattttgtgttttggtatagtattaataaataaagtgttttcaacgtaattataatttaattgttgtgcttctgaagcggtgataccaacacgagaaagtggtggatcgataaatactgtataagggataataccacgattttcagtatgtcgtgaacgatcaccgaacaattcagatttcaagattctaaagtcatctaaagaaatataagtgaattgtaatccaccttttacatctccggcagcataaatatgtgatacagaggtttgtagatggttgtttacttttatttctccgtgagtgcctaactcaatatctgtattgttcagagctaaatctgtatttggtacacgtcctgtagcaagtaagattgcatcaccagtaaagtttccttgtgaggtttcaactgttgtcaaatcaccttcattttttaatgcttttgtttcaacattagtaattaaacgtacgcccttatctttaaaatcattaatcatgtgtgtgactatttcttgatcttctctggccataaattgtttattatattctagtacagttacgtttgtaccaaagctttgaaacattgaggcaaattctaatgcaatatatcctccaccaataatcactaattctttaggttgataagaaatatttaatagtccttttgaatcatatacattttgtgctgagtctataccttcaatatttggaatattagattttgcacctgtattaattaaaattttatctgctgtcagtgtttgaactaacttaccattttcatcaattaattctacttctgtattagatttaaattgtgctttaaagtttaacaaggtaatattttcatcattttctaagtttaaatagtttttttgatttaatgctttgactacttctttttttcttgaaaaggcagttgaaaaatcgacatgtttaataccatcattaacaagcactttagatggaatacagccatggtttatgcatgtaccgccatagctttctgtaaactgttcaattaaagcaacctgttgtccttgtgatgatgcatatttggcaagtgtttttccggctttaccaaaaccaataacgattaaattataatgtgtcatatgttgtatcctcctgaagtgtatcattaattacatcattaattgtgagggtatcataaaaatttaaaataacacgatgttccttttgattatagtgtgacatggtctttgctatgtttcttgatatttcacaatcgctctgctcatgacctgtgaaaatacgctgttggctatctttttcaagcacaaatatacgatatagtactgatagtttaatgctagcagttgaatgatttgcactatatccaccatttttaccacgggaagtattaataaactggtattgatttaaaacagtagtcactctacgtaattgaactggattgaggcaagttaattttgctaaagattgactactgaattgttggttgtcgtgctttactaaaaaactaagtacgtgaacggcaatgttaaattctaaattcaaatgatgcacctcctaaatgtaactttattagttacatttaaatataaaataaaacatatgtcaaatttaatgttttaaacactactgaatgaatttatcattactaatcgggtaaactataaatagaaactacatttttaaggagtggtgaatatcatggcagaatttgtacaattaggaaaatctgatgttcatgtatttccagttgcattaggtgcaaatgcagtcggaggacataatttatatcccaatttagatgaagagcaaggaaaagatgtcgttagaaaagctattgataatggtattactttaattgatactgcgtttatttatggacctaaacgctcagaagaacttgtaggagaagttgtaaaggaatatcctcgtgaaaaagttcaaattgcaactaaaggatcacatgttattaaagataatggcgatgttgttcaaaataaccaacctgattatttaaaacaacaagttgaagagagcttagaacgcttgcaagtggattatattgacttgtattacattcattttcctgatgagtatacaccaaaagatgaagctgtggcagcattacaagaacttaaaaaagaaggaaaaattaaagcaataggtgtttcaaactttacgttagatcaacttaaagaggcgaataaagacggatatgtggatgttgttcaattagaatataatttactacatcgtgaaaatgaagaagtaatgaaatacgcagctgaaaatgatattacttttgtaccatatttcccattagcttctggcattttagctggtaagtatgaagaaaatcaaactttcgatgatcatcgtgcaactcgtcgtgatttccaaccagaagtgttcaatgataacgtacgtcgagtaaaagaattatcaagtattgctgaaactcataatacaagtattgctaatattgtattagcattctacttaacacgtccatcacttgatgttgttattcctggtgcgaaacgtgctgatcaagttgtagaaaacattgaagcagcaaatattgaactgactgaagaagaaattaagaaaatagatgatttattcccagttgaataaagtacgttaaataaaagtaataatggctcctacaccgtttatataggtgtaggagtttttattataaataaaagtaaaaagatggggtacataataagtaaatagaaaaaacacattaataatataaattaaaaaagaggtaagatacatgattactgtattatttggtggaagtcgtccacaaggaaatactgctcaattaacacaatatgctctagaaggaaaacaatataattggattgatttaacacaatatcattttaaacctgtaagagattatagacatgaatcaaagcaaattgagtcatacatagatgattatcaattgattattgaccaagtgcttgaaagtgatacagttatttttgcatcacctgtgtattggtatagtgtgtcagcatctgtaaaagcatttatcgatcattggtcagaatcattaatcgatcctaaatatcaggattttaaaactaaaatgtctaacattgattttagattaatcttagttgggggagattgtccgaaagtaaaagcgaaaccttgcattaaacagttagaatatagtttagattttctcggagcaaacctaaatggttatattattggtacagcagaaagacctggagatgttatgaaagatgtatatgctctagaaagagcacaggaatggaatgcagtactgtcttaataagatgcatcttaaagttgagtgaaagcgtttattaatatactatgatataattttgttattaaattacaataaaatgtcaggagaatgaagcatgtatacagttagaaaagcgacaactaatgacgttatagcaataagagatgtagctacaaaagcttggtataatacgtatttaaatatttatgcagtatcaacaattaatgaattattagcagcttcgtataatgaacaccatttaaaaaagcgattagaagatcaactttttttagttgttgaagaaaataatgaaattgtaggatttgctaactttatctatggtaaagaattatacttagccgcacattatgttcacccaggtgtacaacataaaggttatggaacaagtttacttgaagaaggattacatgaatttgaaaatgaatatgatacggtctttttagaagttgataataagaacaaagaagctattcattattatcaacatcatggttttgaaatagttcgttcatatcaaccagaaatgtatggtgaacaattagatttagcattaatgaagaaagtattataagaattaatcaacttaaattcatattactactgatgaaagcaagtatgaaagaggaggatgaacttgacacaatcatcttatgtaactaaaaaattagctgaagaaaaagtatttaaagatccaattcataagtatgttcatgttaaagatcaactaatatgggatttaattaaaactaaagaatttcagcgcttgcgtcgtattaagcaattaggtacattataccttgcctttcatactgcagaacacagtcgttttggacactctttaggagtctatgaaattgtaagacgtatgattgatgaatcatttgttgggcgtgaagcatggaataataaagatcgcccccttgctttatgtgcagctttattacatgatttgggtcatgggccgttttcacatagttttgagaagatatttaatacggatcacgaagcgtttacccaagaaattattactggaaacactgaggttaacgaagtattaagtagagtgtctgagacctttcctcaggaagtagccgatgttattaataaaacgcataaaaataaattagtcatttccatgatttcatctcaaattgatgctgatcgtatggactatttgcaacgtgatgcttatttcacaggtgtatcatatggtacatttgatatggagcgtatacttcgattaatgagaccatcaaaagatgaagtacttattaaagaaagtggtatgcatgctgtagaaaattttattatgagtcgttaccaaatgtattggcaaatctattttcatcccgtaagtcgtggtggagaagtactattaaataattgtcttaagcgagtcaaacagctttataaagaagattatcaatttaaaatgtatccaaaagaatttattccattttttgaaggcacaattacaattgatcagtatgtagaattagatgaagtaactgtattattttatttgaagaaatggatacatgaagaagatgagatcttaagtgatttagcgcgtcgatttattaatcgtgatctctttaagtatattccatttgatggttcgattattacaattactgaattacaggatttatttattgaaggtggcattgatccggaatattattttgttagtgaagctttttcggatttaccatatgattatgatcgacctggttctaatcgacaacctatccatttgttaagacgaaatggtagtattaaagaaattagtagccaatcgttagtcatttcaagtattactgggattaatcgagaagactataaactatactatcctaaagaaatgattcttaatattaaagatccagaagtgaaaggttcaattattaatttattgaatgaattaaattaaatatttgttgataatatacgctatgatttaatagcaagtgtgaaaaggtaaagaagtattggaggaatcatcgtggcagaaaataaagggtttaaatttaatattataaaaaatgatcctctagatggtcataaaggtacaaatataggagcaattagtttagataatattgcacctgtatttatcgatgttgcaaataaagaagcatttgttgatattggcggtatgcatgcacgtgcggaagtagaaaaaggcgtaaagtggattactgataaagaatcagtggaaggtccagaggctaaagaatattggttatgttgggtgactactgaacgtggtgaaaatggtccttattacgcgggcgtcactgcatgttatttacttgtaaataaaagtattcgtcgaggttataagagtatgccagaacatgtcaatatgatggataagtctatgaaacatcaagttattattgatcaaattggtggagaaaataaaaaagtattaaaagattttttaatatcccataatgaaacaatgtggaataactcaaacgaggcgttatttaaggcatttgattagaaaaaacttgagacactcagcagtgcatattcaatgactgagtatctcgagtttttatttttttaaagtatctccaacattataaaactgataaactgatttcattacattatgataaatctgttgaagagattgttcagtttgtttactaataactcttaaatcgtcatattaaaatttctgcttaaattcgacgatttagactttaatcatatatcattaatggtaaattacattgaagatgtactcgaagaggccaagcgtgcaagagccgagcctttgtctgaaacacatgataattcaacttatgaaggtactaaagacagtaaaagcgtttatatcaaatcgccttttaaggcattgattgattgcaagcgatccttaatgggtattattatccagaagataatgaagcaaaagtatttatttctgggaaataaggtacagctaatcaaatttagttattaagaaatgtataaaaatgttatttaatgatataattatttaaaagattatagctaatttatggagtaaagaggacaacaaatgaaaaatatcttattatttgtagcatcaatcggtttcggcatcattttcttctataaatatagaacacttttagaaaagtatcattatgatattgttgaacttgaatcaaaagcagacatattagaaagaaaaaagtaataccatgatactaatggtgacattcaaaacataataggttggaaaaatagagtctgagacttaaaacataagcgtcttagactctttttcattacatagaggtagataattaaattaaaaacataggataccaagattttttaattgtagcggggccccaacacaaagactttcgaagagaaagtcaacgggtaacgtaagttggggaaaggacttaaatgggacaataaacgcaaaatgacttttgttccactctcgtttttatgataactattgaactaatgttgatagaattttgttaacttcaagcgctataggatttatgctataatgtggtgtaatattttaaagattaaggtgagtcagacgttggataagaatatacacattcaaacgaaacaagtcttaaaacaaaatggagaaaaacaaacatttgaattttcttctcaaggatcatggcaacaaaaacatgccgattatattcgatatcaagaacaaattgaaagtgcagttgttaatgtaacaattaaaattgaagacaatggcgtgaagttgatacgtaaaggtgatatcaatatgaacttacacttcgttgaaggtaaggacactacaacactttacactataccagcaggacgcattccattaatagtaagaactaagagtattttacattttgtaaatgaaaatggtggaaaattaaaaatacaatacgaattacatcaaaatgacgaaaaaatgggctcatatcaatatgaacttaagtataaggagataggcgaatgaatattattgaaaaagtaaagaaaactttaatacaagaaattgaagcaagtattaaaaaagcaaatctagcagaagatattcctgaaattaaagttgaaatccctaaagatactaaaaatggagactattctactaatattgcaatggtcttaactaaaattgctaaacgtaatccacgcgatattgctcaagctattgtagacaatttagatacaagtaaagcaaacgtaaaacaagtagatatcgctggtccaggatttatcaacttctatttagataatcaatatttaacagctgtcatctcagaagcaattcaaaaaggggataaatttggttatgcggaagaaccaaaaaacaaaaaaatattattagaatatgtatcagcaaatccaactggtgatttacatattggacatgctcgaaatgctgctgtaggtgattcactagcaaatattttaattgcagcaggttacgatgtaacacgtgaatattatattaatgatgctggtaatcaaattacaaatttagcacgttcaattgaaacacgtttctttgaggcattaggggatacaagccatgaaatgccagcagatggctataatggtaaagacattgtcgaaattggtaaagacttagccaaaaaacatccggaaatgaaagattactctgatgaagaacgcttaaaaacatttagacaactgggtgttgattatgaaatggataaattgaaaaaagatttatcagatttcaatgttcattttgataattggtttagtgaaacatcactatacgaaaatggtgcgattgataatacattagaaaaaatgcatgagttaggctatacgtatgaagcagatggtgccacttggttacgtacgtcagactttaaggatgataaagatagagtactaatcaaaaaagatggtaactatacgtactttacacctgatacagcgtatcattacaataaaattaatcgtggcaatgatattttaattgatttaatgggtgcagatcatcatggttatattaatcgtttaaaagcaagtttagaaacatttggtgtagatagcgatcgtttagaaattcaaattatgcaaatggttcgtttaatgcaaaatggcgaagaagttaaaatgagtaaacgtacaggtaatgcaattacgttacgtgaaattatggatgaagtaggcattgatgcggcgcgctatttcttaacaatgcgtagtcctgattcgcactttgattttgatttggaacttgcaaaagagcaatctcaagataatccaatttattatgcacaatatgcacatgcacgtatttgttcgattttaaaacaagctaaagaaaaagggattgaaatagacaaaaacgctgattttagtaccattacaaatgaaaaagcgattgatttattgaagaaagtagcagagtttgagcctacaattgagagtgctgctgaaagtcgtgcaccacatcgattaactaattatattcaagacctagcttcagcattccataaattctataacgctgaaaaggtattatctgatgatattgaaaaaacaaaagcacatgttgctcttattgaagctgttaaaattacattacacaatgcattagcattagtgggtgtatcagcaccagaatcaatgtaatataaatacttttaagttaaaagcacctttacgaatatttatttgtgaaggtgtttattttttatagaaaggtaaaaagatgtcaatgatgactacagaacaactttacaaagcattattaaaacatatggggcctcaaggatggtggccagcagatacacgtgaagagatgatattaggtgctatattagttcaaaatacaaactggaataatgctgcactttctcttagacggctgaaagaagcaacccattttgaaccgcaaaacatattaaatctgccgatagaagaactaaaaatattaatccgctctagtggtttctataataataaatcaaaagcaatttctacattattcaactggttaaatcaatatcagtttgattattgcaaaattaatgaagtatatggagaacgtttaagaaatgaattacttaaactacacggtattggaagtgaaacagcagatgtattgctagtctatatttttgagagagttgaatttattcctgatcattatacacgtcggttatataaaaaactcggttatgccaatactgagaattacgataaattaaaaagaaatgtcgaattacctccaaactttacaaatcaagatgcaaatgaatttcatgctttactagataattttgggaaaaattattttaatggttctattgaacaaagatatcatttcttagatcaatattttacaaaaatggattgaccttgacgtgacgtcatagcttagtctcttttatagagagatgaaaagagtagtgaatcaaatagattaagaaaaaggcaggatgtcagaatggaaaatcaggcatattttacacccaatgacgtgagtcaaattaccgaagtaactaaacgcacacttcattattaccatgaaatcgagttgcttgtgcccacttatattgcatctaatggttatcgttattattcttctaaggacatctctaaattacagaccattcaatttctaagggaactgaatttatcattagcagatattcaactttattttagtaacagtatagaagagaaaaatataatattagaaaataattatcagtgtattgttgcacaaagagatcaattaaacaaaatgattcattttcttaatcatcatctcgttaatcatagaaaagaggaaattaatatgagtaaatggaataatgataatatacagaatcaatatgagaaagaagctgaaatgaaatatagtcatactccttattatcaagcttttaaagagaatcaaaaacgattgaattctacagaaaaacaacaaaataataagaaaacaatggagaggttacatttattctttgataaaatgaatgaattattcattgcaaactataaaataaatcatgtacaggttaaacaagcaatttctgaactaaaagatattcttcaaacacaagtacctaacgtagatgaacaatttttagaatatattgcctcgatttatgagaatgatgagcgatttgctaaaacaattaataacaaacgacacgataatttaaatcagtatattgctgatgcgattcgaaatgatatttaataaaagatgtttttaagttctataatatgtgatgatatatatataatatatctgatgaataaaaggagcttaaacatgatagaagcgttcaaattattttggcaaaattattttaatataaaaagtcgaactagaagacgccattattggtttgctattttagctaattgtattattttagtgattatgagtttactttttaatatcattactttggggttaaatggagggcatacattttttgatattgtgtatgaaatcattgatatcattatttttataggaacgtttacgatgacggtacgtcgtttacatgatacagggcacacaatggttctacctcttattattttaatttttacatcaatcagaaaaatttcaagtattgtagatagaacatacggtatttcaattgatggttttttcaacggaatgattgcgcttgaattaggaattatggtggcagcgatgtctttagtcttacttattattcttgtgattacttttgcatttacaataaaagatagtgatgaggggacaaataagtatggcccaaatcctaaaatagctactgtatagtatgaaaacaggaaggatacagaatgtattttgaaatctgtttccttctttttttattttgaaatagaattaaatcattaagtttaacaataatataaaattacacaataaaaatttatagaattaaattaatgatataaataatttggtatgataaatatatgaaataaacaaaattgtgaaaggaaggtattgtttataaatgaacaataagaagctgtggattattttatttacattagtattagttttagcagcatgtggacaaaatcaatcgagtgaaaaaggacatcattctacgcattcaactgagcaaaaaacaacggatcacaataataatactcatacatatcatcgtattatatctttgattccaagtaatactgaaatattatatagacttggtcttggaaaaaatattataggtgtatcaacagttgatgattatccaaaaaacgtgaaaaaaggcaagcaacaatttaatgcaatgaatttaaataaggaagcactcttaaaagctaaacctgatttgattttagctcatgaatctcaaaaatcatctgctaaaaaaacacttgatagtttagctgatagtggtgtgaaggtagtatatgttaaagacgctcagtctttaaatcaagtctacgattcatttgagcaagtaggtaaagtgacgcatcgtgaaaaagaggcgaaacagttagtcaaagaaacaaaagataatgttcaaaaagtaattgaatcaattccagcacatcataaaaaacagagtgtttttatagaagtgtcttcaaaacccgaaatatatacagcaggaaaagaaacctttttcaatgatatgatagaaaaactagatacaaaaaatgtattttcaaatgttagtggatggaaagaagtagataaagaaagtattattagaaaaaatcctgatattttaatttcaactgaaggtatttcaaaagaagaatattatgaagtgattaaagaacgtgatggtttctctgaagtcaacgcagtaaaaaatgaacgtgtggaaacagtcaatggtgacgaaatttcacgaccaggacctcgtattgatgagggtatgaaagaattacgtgatgcaatttataaacgttaaaacgttaagatgagagacttttcaaaagcctacaacgatattgacaatgttgtaggctttttatacaacatatattcttgtaagtttagcaaagcagagaaagaatcattttgtaatcttattttaattagtagtaaggatatattcattgtaatataagaaataaataataattgaaatgtgagtggaaatgaaacgacatctatatttaacattttcagtttggacactttgcttatgtattataatagctataagtcttttttggggtttagggtcattacatcaagcatttaatcaaatgattttttttaaggttagagttcctagaacatttgaggcacttatggtaggagccatattaacgttgacgggtcaattatttcaaacggtattaaataatcctttagcagatagctttacacttggtttagcgagtggagcgacttttggatcaagtttagctatatttttaggtgtatcttttctatttattccaattttttctatcatttttagtatcacgacacttttacttgttgttataatgacaatcgtattgtctagaaattttccaattagagtactcatcatatctggacttatggtaggcgctttttttaatgcattaatatatatacttacactcattaaaccagaacgtacgaatcgtatgttagcctattatttcggaggatttgcgaatgccgaaatgaatgagctcgtttatattacaatggtttctttgccaatcattattgtgatatatagtttagttacaccaattaagctcttgcaattaggagaagctaaaagtaagtctctagggttaaatgtgcaatggataacatttattgtacttttgttaacatctattatgacagctatagcagtagcgtttataggtgttataggttttattggtatcattgtacctcaattaattagacgatattattttcaatatagtcttgctatacaaatgacattaaacatattgataggtgcattaacgatgctattcgctgatgttgtagggaagattgttattaatccagtgcaaattccagcaagtattattttatcacttgttgggatacccatattattttatattttagtcactcaatctaatacaacacgttagtgaagtgaacaaaaattattaaaataagaataattatagtgataagaggtaaataaaaatggacttaagccaaatcaaagcagttgtgttcgatttagaaggcacattattggatagaactaagtctcgagataaatttatagaagaacaatatgaacgttttcatgattattttgtacatgtacaacttgctgactttaaacataaatttatagaattagatgatgatgaagataacgataaaccttatgtatataaggagataataaaacaatttcacatcgatagattgaaatggaaagatttatttcatgatttcgaaatgcatttctatcgatatgtatttccatactacgatacattatacacacttgaaaagttgtcagagcatgattatttactcggtgtaattgcaaacgggaaatcaaagattaaacaatttcggatttattcattaggaatagaacacgtgattaattatttatcaacttctgaaacagtaggttatcgcaaacctcacccacgtatttttgaagatatgattgatcaactcggcgttttaccagaagaaattatgtatgttggagatgatgccttaaatgatgttgctcctgcacgtgctatgggaatggtaagcgtttggtataaacaagaaaatgctgaattagaacctttagaagaagaagtagattatatcattacaacaatagaagagctcttaacgattttatccataaataaacaaaaaaaaggagataattaaatggaattatttacaagaaaaggtggatttacattaaattacaatactatgggacaaggatacccagtagtgcttgtacatactgcgtttgaaaatgcttcaatttttcaaaatttagctcatgcactttcaaaaacatttcaagtcgtattattggatttacgtggtcatggatattcagataaaccacgacatattaaattcaatgaatttgcagatgatattattttattattagattatctctacatagatcaagcggcttttattggccatgaaatgggtgctacaattattgcgcatttatcaaagcaatatccagagtatgtctcttcgttaacaatgatcaatccgacatctattgaaggagagttaccagaagaacgattgtttagaaaatatgcacataaaatccgtaactggaatgaagataaacaagagaagtttttagataaacatcgctattataaacatcgtaaagtgaataagttcttaaaaaatgtcgaagatactaattcaatttctactaaagaagagacagaagcagtagatgaagtatttaaacaaagaggaattgcagaagtatttgagtacatcactaaacccacatttatagttgcaagtgcgtatggagaaagaataacatctcttgaatctaaagaagtagcagatttaataggaaatgtacattttgaagtgtattcgaagtcaagcatgtatccttttgaagaagaacaagagaagtttatccatgatgtgacaccttttataaaaaaacatatgcctcaacactaaataatattatttaccaaaatgaatggattataaaaaaggaatattttgtaatgtttttgtaatatttctgttatttttgtaatggatagggtatactgtaattaagcataaaagaaaaaggagcgagtgcttatgaaaaagttagcaacagccctattagtttcaggactagtaatgacaggagtaggctataatcatgctgaagcagctagtggtaattcgattcagactgtacaacaattaactcaaggtcaaaaaacattagaaaatgtgacaataggtgaatcaattaaaaatgttattaatcactatggcacacctatttattcatataatccaaataatcaagaaaaatattatgaattccatacaaataaaggcgtattagttgttactgccatcggtaaaaaaaatactggttatgtgactagagtatcaatgacttataatcaagccaatggtccaacttatcaaaaagtagcacaaagcgtaggtaaaagagccattaaacgtgttcaatataatagtgtaagtggcaattttgcttatattcaaaacggtaaaacaagctatcaatttggttcaagctcacctaaagacaaagtattaaaattatatcgtattgatattaataaataatgtaatgaagtagttagttaaagtgacgtataatccatttcatttaaaaggtaatgaaatatatagaagtaggataacgaattcaatctgggattcgttatcctacttctttttatgaaaagaaatcaattgaaatctatgataaaatgttgaaatgaataaattgaatgtattttaaaacttacatttgataaaggagcaacatatgcgatcaaacgataaagtattacttgaaaatgtgaatgattattttactcataaaggcatgccccctaaacttatcgatgacattaaagaaaatatacgtaatgactttaaaaaatctgaagaaaaaaagcaagattatcttgattttagagggaaaacaacggctcaaattatcctaattattcaacgaaatttatttggtttacaattgaatcctattatattttttattatcaattttattttaatttcatatttatatgataagcaatacgttccattccaagctgcaactatattatctttgttttattgtattgttattttcccgattactatttttattcatatacaaattgctcgaaaaaaatatttatatagtaatcgcacagagataatcataggctatatgattgcaattattgctttaattcttattattatgcgtgcatttaatctcactataggcattgttcctattactatgtatagtcatcaatttattttctttatgggacttataatgagtttatgcggggttatttttaaaagattagaatatacagcagtaggtttattattctctcaaaagacgattgatgctgttattgtaaattcaaatgtcgctcaaactgtttcacttatcatttggattattatcgtcgtactaattgttacatatactatacgattatcatctagaagaagtatttaataaaatatatgattttaactcaaccctgattaatagggttgagtttttttatttaaattatataaaaatttttaaataaaaaaataattaattgtatacatgtttatagcgttaaatatgttttagtgggtatagtaaatactaagggaggtgccgatatgaaaaaaattgaaacgtctaatcaaataaagatagcttatcaagatgcaggtacaggcattcccgttattttaattcatggtttagatggtaatttagctgggttttactcattaaaaaaagagttgaaaaaacactatagagtcattgtttatgatgtgagaggtcatgggaaatctacacatcctacgagttataacttaaatgatcacattaaagatttaattatgttaatgcaacaattaggtattaaaagcgcacatttattaggacatgatatgggtggaattattgcacaagcttttaccgaaaaatataaagagaaagtgcgatctttaacaattatatcttctaaatctgaagatattgtccatggttttacaaaattaatgattgagcaccaagataaagtagcggggtttaataaatctgaagcgttacttatattatttccatatatttacaaaaaaagtgacgttgcaatgaagtggtttcaacgtcaacgtttatatagtaaacaagacgatgaagatagtgcagtagcatcaagagccttattagatacagagaatcaatcaaatacagtcacacatgaaatcaatgttccaactatgatagtagaaggacgttatgacccaattattatcaataaagagaatcaacaatttgaaaatcaatttaaaaatataaattatgttttatttaatgactcagggcatgcacctcatatagaagaagaagagaaatttttaacattatatttaaattttgtagaaaaaaatgatgaatctcatactacaaatttattgatataaaattataagcatagagtcaaaattatctacaatagaatatctaaggaaacagaacaacctaaagggtggggttctagatataaaaaaattattaaacaatgtttataaatattagaatgaagttattttacagaaaacaacatcatataatatgaattatggctataaaagaggcccgtagacgaatgttatctacgggctattattctaggtttttttaagttctagtctctttagggtttactattataattctgtttctttattagcttcttcgattcgtttgttaactctattaagtaattcatcaatttttgtacgttgcgttgcatttacaagaatcaatactgttctttcatcatgctcattacgttttttatcgaagtaatcttcttgagataaatttttcactgcttttactacttgaggttgcttgtagtttaagtgattaataatatcttttaaataatattcttcttctttactttgactaatataagttaaaacagcaaattcttcaaagctaattgaaaattcttttttaataatgctttttaatttatctgcataagtaatcattgctaataattcaaagcagtcattaatttttgaaatagccattttaagacctccccaactaatattctttctattttttatgcatccgttaaatttatctatatataacgtcaactattagtttaaaaaagctattaataatttagattaaataaattaatttaattctattttatttagttaattataactaaataaaattagaaagtaaacgaaaatgcacttaataaaacaatattttgattaattaatactttgtttataaaaataagcaaattttataaaagatttaattaagaacaattattatgatactccatattataaaattaaagtttaatatactaaaataaaagattattcggtactttctaataaagatgtagaaggatgcgtaataattttatcaccaatatttaatccattggataccataatatacccactttttttacttttaatatatttaatgtttctttttataatttttttattatgtataactagaacataatttttattgtaaatgactttattgggtaattcatattctgttgttcctaagtgaagatcaaaatggtatccaatagggtaggaaggatctgtagaaatatctacgttataaaaagagaaagatgactcagttttataaggaatagaagaaatagataaaatttttccttcaaattgcctagtatctttaatagaaacttgaacaagttgattatttttaagctgtttgagttgagattcattgattttagcacggatgattcgttcatcactattaatttgcataatttcagtatgagattttgaagggaaagggtgaagtacagtgactcgacctttaataggagcataaatacgtgtttgaagttgttgctgtaagttgagtatatcattagataattgaacttgttggttgaagttatcggaggatattttatttgagtgttgtattgaagataaaagattcttttttgcaagaatatgtttttcaatgtgtggattataatatttaaatataggtgtatctttagatatcgtttcgttattttttactagaatatctgaactaatacctaatgagggctcataataaagtgtataactttgtttagcttgctgaacgccttgaaaagaaagagagtaatgtggttttacagtcatcgtttctattttgcttaaatgagtagttttaggaatcttagaataaatataaaatccaaacgaaataataaggagaaggaggagggttaccagtattggtaaaggggataaaaactttttcaaatataatcacctctaaacattaatatgcatttattatacaagtttagagctaaatacaacataattaaatgatgacatcaaaaaagtcttctcaattatttcattaagaagacgaagatttagataaaagtttaattttattagccattaaaataaacgtaataaaacaataccaattgctatagcgattaatcctataaatttacggaaagtcatttcatttttaggtacaccaatgccaaagtgatcaataatgacgcccattatcatttgaccaagcattgcgacaatagttgtaagagcagcacctaaatagggcattaatataatattagatgtaacgaatacgacacctaaaattccaccaataaaatagagcggtttaatacgaccgaaatgatgttgtgatagtttaatttttaaacttctattaaatatgattgttagaataaataacgcaatagttccaacagtaaaagaaactagtgcagcgaataaagaagaatgcatttgctttgaaagtccgctattgattgtagtttgtagtggaggtgcaaatccgaaaataaagccaatgaacaaccaaatataaagtgagatatttcttttatctttaagtttatttttaggtatatgattcataagaagaattccgaataataaaacaataattcccacaccttttaaaaaggtaaaagatgtttgattggctccaagtaatcccaatgtatcaatcataacacccattatgatttgaccagcaactgtcatcacaaccgtaagtgctgcacctaatcttggaagaagtaataagttacctgttaagaaccatacaccaagcaagccaccaacccaccaatgataatcaatagagtgaccagcataaaatgagcttgagaacatttggatattaaaaatgatattaagtattaataaaaatagagtgcctacaaaaaaagaaatcgtagaggcataaaaagatgattctgtaaatcgacctaatctagaattaatcgatgtttgaataggcaccatcataccagaaataattccaagtacaaatagaaaaagcaaacttaattcctccattatttttactatcaaatacgattattatacgtaaatttataaaaaaattctatactaaaaaagagaacggatagaattctgttagaactctctatccattctcaatctactgtttagaagacgtgaagtaaaatttgacattgtaacttacgtctactatgtcaattaatttaattcaaataaaacagttgttgttttatctacaatctgagctgaagcgactttacttggagcgccactggtaaatcttaaaacatctaacttaatgatattttccattgctgattgtacattagcttctgttattgttgctgaaatttgtggtaattgtaacttagctgttttgtttaggtttgtcttaaatataagttctaacgtttttgacattgttcatacctcctttttaataaaagcattcattaaactaatccttgagtttttacaacttcaactttatcgaaagattcttcaatcaaatttgaaattgttgttacaaatgatttgatgtctgcttcagaagcacgtgtattaatgttattaaatcgacgtttaatttctttagcttttccatttgtatcatgtgtaacgtgagtacaaataacagataactgagtaatttcgttcatcttactttcacctccttacactttatatatcgaaaatatttttaaaaaaagtaacttgaagtcaaaaataattgagcgaaatattttaatgttactaaaatatgatatatcattaaataagaaacttttttgaggtggataaatgaattatgtagaacctattaagaaaaagaatgatattaagaagatgtatcacgtgttacaaatgaaatcagacagagattatcttttatttaaactggctatacatacaggtatgcgacttactgacttattacatcttaaagttgaagatataaagaataaagaaaataaagaaataaagacagcttggattcaacaaagtgccccatttatcaaaattatgattccttctgatttaagaaatgaaattgatacatatatctatgaaaatcagttgaaagatgatcatcttttatttcagtctcttcgtacacataaagaactttcacgtcagcaagcttatcgaattattcaccacgcagctaaagaattaggccttttacatattggtttaactactctacgtaaaacttttgcatatcatgcttataaatcgggtatttctattgcgattattcaaaaatatttaggacaccagactacgcatgaaactttgaaatttattggtttgtcacctaaagaagatcatcatacaattattgctttgaatttataaaaaggagggttttgatgagtttaatttatttactaggggcacttttactaatcataggtatggttctaatcactttatttattagacctctaagacgctatgcgggatatatttccctatttgctccagtaattgcttctgtttatttcttatctcaaattcctagtgtacttcatcagaaagtgatttcttttaaactagcttggatgccagctatcgatttgaatttagatttaagactagatggacttggattaatgtttgctttaattatttctattatagggatagctgttttcttttacgctactcaatatttaacgcctaatggtgataacttacctagatttttcatatacttacttttatttatgtttagtatgttaggtatagtaatatctaataataccattcttatgtatatcttctgggaactcacaagtgtttcatctttcttacttatttcgtattggtatagtaatgcaaatagtcagctaggtgcaatacagtcatttatgattacggtatttggcggattagcattattaacaggttttattatgttgtacataatgacaggtacgaatacaattactgaaattttatcgcaaagtcatcatattagtgagcaacctttatttattccaatgatcattatgatgcttattggagctttcacaaaatcagctcaatttccattccatatttggttacctaaagctatggctgcgccaacccctgtaagtgcctatctacattcagcaacaatggttaaagcaggtatatttttactatttagattcacacctgtattaggcttaagtaatagttatatttatattgttacttttgtaggattaatcacaatgatgtttggatctcttacagctttaagacaatatgatttgaaaggaattcttgcctattctacagttagtcaacttgggatgattatgacaatggttggtttaggtggaggtattgcgcagcatccaagcggaccaatggctaaaatttacacattagttttatttgcagggttgttccatgtcatgaatcatgcgttatttaaatgtacgttatttatgggcgtaggtattattgatcatgaagcgggcacaagagatattagaaaattaaatggtatgagaaaattctttcctaaaatgcacgtgagtatgacgcttgcagcattatcaatggcgggagtaccatttttaaatggttttttaagtaaagaaatgttttttgattctttagttaaatctattgaattagagcaatttagtttaactttaaccatcataattgtggcattaggcgtgattgcaagtatattcacgtttgtctatgcagtttacatgctaaaagaaacatattggggagaatttaacgaaaaagaagttcctaaaaagcatattcatgaaccatggttgttcagtttaccagcaatgatctttgctgtgatgctacctgttatcttctttatcccaaatacctttacgcatccaattgttttaccggcattaagaaatgtcacaaacttaggtatccaagttgataagatggcaccacatgtatcccagtggcatggtattaatttaccgcttatttttagtatcattgttattattttaggaattattttagcaacaaaagtaaattggaaagtgttaacgcaccgcttaatcaaaacagcatcgattacaaattcctatcgtagagcttatagcatatttgaacattatgctggttgtagtattcgtggtgtaatgacgaaccgattaaattactacaatgtgattacgcttttagtgttttcactatttgtagcgtatggctttttaagagtagggtttcctaaactacatctaatgcatgttactgactttgggcctttagaagtgctgcttgcgatttcaatcagtgttgttggtatagcacttgtctttataagacaacgtttaacgatggtaatattaaatggaattattggctattcagttgcattattttatttaatcatgagggcacctgatttagctttaacccaacttgtagtagagacgatgactacaatattattcattgttagtttttcacgcttaccaaatatttctcgtaagaaagcagataagaaaaaagaaatgatgaaaattgttgtagcattcatttttgcaggcgcagtggtaacacttgtatttatggcacaacaaggtgatggtttagaaactatttctaaatattatatgaatgcaaaagaactcacaggtggtaaaaatattgtgaatgccattttaggtgattttagagcacttgatactatgtttgaaggcttggtattaattattgctggtttaggtatttatacattattaaattacaaagatcggaggggtcaagatgaaagaaaatgacgtagtcttaaaaacagtaactaaaattgttgtattcattttacttacttttggtttctacatttatttagcgggtcataataatccaggaggaggatttattggtggtctcgtctttagctcagcttttatcttgatgtttttagctttcgacgtaaaaaaagtattggatagtttacctatcgactttagaaaattaatgattattggagcgcttatttctttaatcacagctattgcgcctaccttttttggcaaatcatttttatatcaaagtgaatttacacttcatttaccaatatttaatgaaatgcatattactacagtgacgattttcgaattaggcatagtactttcagtagtgggtgtgattgtcacaattatgttggcattgagtggaggtaaatcatgaatcttattttattactaattataggatttctcgtattcttagcgacatacatgatattatctttaaatttaattcgtattattgtagggatttcgatttatacgcatgcgggtaatttgattattatgagtatgggtcactatagtgaccacgtaacagaaccgcttattcgtggttcaaataccaactatgtcgatccattattgcaagcacttgttttaactgcaattgttattggatttggtatgacagctttcttacttgtattagtttatcgaacatatcgtgttacaaaagaatcagaaattgatgtgcttagggaggatgaagatgatgaacagtaacttattaatccttccgattctcttaccacttctttgtgcattattacttgtatttacgaagaataaaaatagagtttcgaagattttatatattggaacaatgacggttaatacgcttatttcgctagctttattgatttatgtgatgaatcataaaccaatcactttagattttggtggttggaaagcaccttttggtattcaatttttaggtgatactttaagtttactcatggtaacagtcgcttcttttgtagtgactttaattatggcgtatggatttggacctgctgaaaaacgtgtgaatcgctattatttaccaacatttattttatttttaactaccggtgtgattggtgcttttttaacttctgatttatttaacctctatgtgatgttcgaaattatgttacttgcatcatttgtgcttgtaacattaggacaatcaatagaacaattaagagcagccattgtctatgttgttttaaatattattgggtcttggttatttttattaggtattggcttactttacaaattagtaggaacattaaacttttctcaagttgccttacgcttagacgatgttcacaataatgaaatggtggttgtcattgcaattgtatttatgattgcatttggttcaaaagcatcgttagtgttatttatgtggttacctaaagcttatgcagtattaaatactgagctcgcagctttatttgcagctttaatgacgaaagtgggagcatatgctttaattcgtttcttcactttattatttgatcaacatccaaatattacacacccaatacttgtatttatgtcttgtattacaatgattattggtgcttttggagtcattgcatttaaagacataaagaaaattgcagcatatcaagttattttatcaattggttttattattttaggcttaggatcaaatacatttgctggaattcatggtgctattttttatctaacaaacgatattgtagtaaaaacattattattctttattattggtagtttagtttatatgtctggttatagagaatataagtatttatatggtttggcaaagagagagcctttctttggcgtagcatttatcgttatgattttcgcgattggcggggttcctccatttagtggattccctggtaaagtgcttattttccaaggtgcggttcaaaatggtaattatatcggattagcactcatgattttaacaagtcttttagcaatgtatagtctatttagaatactatttattatgtactttggagatgcagatggcgagcaagttgattacaatccattgcctgctcatcgaaaaggtatgattggcatattaactgtagctgtactagttatgggtcttgcagcaccaattgttatgaatgttactaaaaatgcaacagagttaaatacaaatgatgcttacttccatcacttagttaatccacatttaaaggaggagaataaatgagacaaattgtattgaatatcttaattgcttttctatgggtactctttcaagaccaaggttcttttttattctctacctttgtatctggctatcttataggattaattgtgatttatatactgcaccgattctttggtcaagaattttatttagtaaaaatatgggtagctattaagtttttaggtatatatttgtatcagttaattacttcaagtcttagtatcattaaatatattttatttaaaacaaaagatatgaatcctggtcttctcacatatgaaacagagttaaaaagtgattgggccattacatttttaaccattttaattattattacgcctggatcgacagtgattagaatttcaaaattaaccaataaattttttattcatagtatagacatttctgaaaatgaaaaagctaatttgttaaaaagtattaaacaatatgaacgtttaattatggaggtgtcacgatgatccaagcgatgactaacttttttagtacaggagctttaatattatttggtattgcatttattattggattgtttcgtttgattaaaggtcctacaacagcagacagagtcgtagcatttgatgcagctagtgccgtcattatgtgcattgttggggtagttagcgtgatttatgatactgatgcgtacttagattcaattatgttaattgcgatcatttcatttgtaagctctgtatctatttctagatttattggaggaggtcgggtattcaatggaactcataaaaagcgtcactgagttgattgcgtctattcttatttttctaggaagtattattgcagtaattagtgcaataggcattgtaaaatttcaagatgtttttttacgaagtcatgcttctacgaaaagctcaacgctttctgtattacttactttaatcggggtattaatatactttacgacggcgcaaggtctctttagtgttcgtttattattatccattgtctttattaatttaacatctgctgttggtatgcaccttgttgctagagcagcttatcgaactggagcatacatgtatagaaaagatgatgcaccaagacaatcttccattttattaagttcaaaagaatttaatacaacagatgagttaaaaagtcgtgctaaaaaaagagaagaacaacgagaaaaactgtattatgatattaaaaactatagagctgaagaaagaaaacaacatggtgataaaaatattgaagatttagaagaataattgcatatcttaatagtttttaagtgaattattttgaaagtgcaagttagttaatctgaatatattttaatgataaaattgatattaaattgagagcataagaacggtagataataactacatacgtttaaaataaataagatgataatgtatcttatatctcaaattaaatatgaaataatggggtgaaagtttggaaatatttgaaacgattctcatatttctagctgttgttattgtaagctcctttgttcatacttttattcctaaagtacctcttgcatttattcaaatcatattaggaatgatcctctttatattgcctgtaccagttgaattcaattttgattctgaactctttatgctagctaccattgcacctttattatttgttgaaggtgttaatgtatctagggtacatttacgaagatatattaaacctgtcatgttaatggcattaggtttagtaattactaccgtcataggtgtagggttatttattcacttagtatggccagatttaccaattggtgcagcgtttgcgattgccgcaattctctgtcctaccgatgctccggcagtgcaagctattacacaaggtaaagtattaccaaaaggtgcaatgacgattttagaaggtgagtctttattaaatgatgctgcaggtatcatttcatttaaaatagcagtaggggtacttgttactggcgctttctcattatttgaagcgattcaacaattcttaattgcttcaatcggaggggccattgtaggattgttaatcggtatattacttgttcgattccgtctaacattaacacgacgtggtattgaaaatattaatatgtttgtatttcttcaattgttaacaccatttgtaacctatcttgtggcagaactattccatgcttcaggtattattgctgctgtagtggctggacttgttcatggttttgaacgtgaccgtattgctcaaacacgtacacgccttcaactaagttataaccatacgtggaatattttaggctatgcgttaaatggttttgtattctcgatacttggtttcttagtgccggaagtcattgtaaaaattattaaaagtgaaccacataacttacttttcttaataggaattactttattagtagcattggctgtatatgtatttagatttatttgggtttatgtactatatcctttattttatctatcagtcagtccattccaaaaattaatgaatgatgatggaacaaatacgaaagagaaaccccctaaacgaagtatgtatgcgttaattatgactttttgtggtgttcatggaacaatttcactcgcaatcgcattaacgttaccttactatttagaaaatcatgagtcatttaagtatcgtaatgacttactctttatttcttcaggtatggttatcttaagcttagtgattgcacaaatcattttaccttttgttacgaaaaatgcacctcaacctaaaataggaagtatgaattttaaagaagcaagaatttatattttagaacacgtgattgattatttaaacaaacgttcctcatttgaaacaagctatcgatatggaaatgttattaaagaatatcatgataaattaactttcctaaaatcagtagaaaaagatgacgagaattcaaaagagctggaacgtttacaacgaattgcttttaacgtagaaacaaaaacgcttgaaaaattagcagatgaaggcgaaattacggaaagcatgttagaaaactatatgcgatttgctgaacgtacacaagtttatagacaagcttcactcagtcgtcgtattattgttggaattagaggattacttttgaaacgtcatattcgtacacgtacaaatgcagcttcatcattaagtgttactgaaaacttaatggaactttctaaaatcaataaaagagtccattataatgttgtaagccgacttgttaaagaggcaaatgaagataataaattagaagtgggtatgatatgtgatggatatttaatgagaatagacaacttatcaccatctaacttctttaacacacgttctgaagattcaattactaaaattaagttgaatgctttaagagagcaacgtcgtattttaactgaacttattagtgatgaagagattacagaagcgacagctttaaaattacgtgaggcaattaactatgatgaaatggttattgtagacagtttaactgattaatttaataataattaatactaaacctaagatacctcgctatgtcttaggttttttttagtataaatggaaggtttaaaattgaaatttaagatgtattcctcttattgtaagatgatagaagacaaccacattactcaaccattcgtgatacaataagatgaaactgtttatgaggtgaaatcatgttaactgaagaaaaagaggattatctcaaagcaattctaactaatggtggtgatagcgcttttgtttcaaataaaatactatctcaatatttagatataaaaccaccttctgtaagtgagatggtaaatcgtttagaaaaagctggatttgttgaaactaaacattataaaggggtaaaactctctgaagaaggtctctctcatacactcgatattataaaaagacatcgtttattagaacaatttttaattgaagtgttaaattataattgggaagaagtacatcaagaagcggaaattttagagcataaaatttctgacttatttttagaaaggatagataaactgttaaattatcctgaaacttgtccgcatggaggagttattccaagaaattatatttataaagaaaagtataatgactcattacttgaatatgatgaaggagacatagtaaacattaaacgtgttcgcgatagaacggatttacttgtttatctatccagtaagcatatttcaattggagataacattgaaatagtatccaaagataaaaccaataaagtcatgattataaataataatacaactatgacgattctaagttatgataatgcaatgaatatatttgtggagaaaaattaaacaaaccgtcatctattcaacttgaatatgatgagccgtttttaaatcataaatttgtatattaaatataaagagaaaacgttaatcataatccaaaatagactataaaataatgttggtaaatgtgtcaattcagctaaagtattaccatcccaatgtgtttttactctttggaaagtcaataatataattgtccaactagattgcaaaacttctcctaataggacacctaagataagatggcataggaggactacgatataaaaaatcataaattgattattgtcttgcaataaaaaatacaataatgaaattaaaatgattaaaacgataatgggagacaattttcgagatgttaaattaaggtaatacacaaatatcaaactatataagattaaaaataagcttggatagttaaaatgaatggtccaaaaacctatcattaacatgattggtggcatgacatatccacctaatgtcgtaatacattgtccagtaactgatttagattgtgttattgcatagccttgttgtaacgtttctttacgttcactagggcgtacaacaatgacaagatctttagcatgccccccacttaacttattaaatagaatgtgacccatttcatgagtcagtactggaatataatttaagtaaatatctaaatattgactaaaagaacaatgtcgattttgatgaataattatataaaatattgctataataatgactaaataaatatttaagataacagtcgtagttaaaaattgttgcaaataatccataatcaacctcacgttaatagtatgacttctattataaatcattaagataaactggacctttagactttagacgtatttttgaatacaatgataaaaataatatatgatgaataagttgaggttattataaattcattacaacatataaagagggtaagaaagcagggagttaacgtaaatgtatagttcaaaaaagaaaaaaaacgataaagtagatatattaggcgtacaattcgataatgtgacaatgttggatatggttgaaaatattaaacatttttttgaaaataatacaaatgataacttgtttattgtaactgctaatcctgaaatcgtagtgtatgcttctgaacatgtaacctatagaaagcttataaatagtgcaagttatatcattgcggatggtacaggtgtagttaaagcttctaatagattaaaacaaccattaaagcgacgtgtaccaggtattgaacttatggaagaatgtattaaatttgcacacgagcaaagtcaaaaggtatacttgttaggatcaaaaaatgaaattgttgcgcaagcacaacataaattacaacagaaatatcctaatgttacttttgagtatcatcatgggtatattgatctgtcagatgaaactgtagtgaaaagaattcaacgtttcaatcctgactatttgtttgttggaatgggctttccaaaccaagaagaatggattcaaaaaaatgaaagtaattttaagcatacagtaatgatgggggtaggtggctcgttagaagtgtttagtggtactaaaaaaagagcgccccgtctttttaggaatttaaatattgaatgggtataccgattacttattgactggaagcgaataggtcgtataaaaagtattcctaaatttatgtttaaagtttggaaattgcagaataagaagaaaaaataaaagaggatgagacttaagcctatgaatcgcttaggtctctacctcttttactttacaacaaaccgtttttcatcaagttgttgtctaaatgctttttgatcttttttagattttttcttaaaattttttaaaaattgctcatatttaggtaacactgtatctaattcaccaaattcttttagctttccaccttcaatccaagcgattttagtacagaattcacgcacttgtctgatattatgacttacaaagaaaatcgttttatttgcttctttaaactcatatattttatctaaacatttttgagtaaatgtttgatcgccaacagatagtgcttcatcgataactaaaatgtcaggattaatcgttacattgatagagaaaccaagtttcgcacgcataccgcttgaatagtttttaacaggttgataaatgaattcgccaagctcactaaattcaataacttgaggcataagtcttttaatttctttctttttaaaccccatacaaagcattttaaattcaatattttcaatgcccgtcagtctcccatttaaaccggcattaatggcgatgacacttacttcaccatgacgatctatatttccagaacttggagataatgaaccaccaatcatattgcttaacgtggattttcctgaaccatttatacctactaaaccaatcacatcaccttcataagcagtaatagacacatcatttaaagcaaagaaggttttgtttttatttttaggaattaacgcatctttgatacgttctttattattgcgatatattcgatattcttttgtcacatgatttatgttaacagatacgctcatgatttttcctttcttatgatttattatatagattataatacatcactcaatagttgttaaatttattaacctagtgtaaagtgtatatgagattttgtatcttttttgtaaacaatatattaattttactttcttttctgaattaagtctatcctaataaaattttcgacgaataagttgcgtaaatatataatggatttatatgaatcattttaaacgttgatttagaaattttataataaaacgattttaatcagtagttaaagaaattaaaagccattatgaatttacaattgaaagtgtggtttatttcaatgtcggcagtaggaactgtttttaaagaacatataaaaaacttttatttagtgcaacgacttgcacaatttcaaattaaaataacaaatacaaataattacttaggtatggcttgggaattacttaacccagcacttcaaattatggtgtattggtttgtcttcggtatgggaattcgtagtaatcaaccgatacatggcattccatttattttatggttactagtaggaattagcatgtggttctttgttaaccaaggtattcttgaaggtacgaaatcagtatctatgaagtttaaccaagtagcgaaaatgaattttcctttatcaattattccaacttatatcgtaacaagtaaattttatggccatattggcttattagcacttattattgcaatttgtatgggaaatggtattatgccgtctatccatattgtacaattgttaatttacgtaccactaacatttttctttgtggcttctgtagcactttttacttcaacacttggaatcattgttcgtgacacacagatgattatgcaagcattactaagaattttattctatatgtctcctattttatggataccaaaagatactggaattagtagcgtaattaatgacattatgaaatttaaccctgtatactttttagctgagtcttaccgtgcagcaattttattccatcaatggtactttattgaacattggagattacttctttataatatgattattattttagtattctttgtattagggtctatattacatcgtagatatcgagatcattttgcagatttcttataaaatgtgtgctagataaatcaatacttacatttattagtagagagcctgaaatgtattagattgcatttcaagctctttagtatatatatcatgaataaatataaaatatcgacgatgtcgatagagatgtatgtgaaaaggataaggagtagagacaaaatcaatgtatttctgtcctactctttctttataaattattttattaacgagtaaggggattaaatgatgacaagagtagtgataaaaaatatttatatgacacttattactatcgtaaaccaaatttttagatttaaacgactaaaatcgaatcatattgcgattttaatgacatttcccgaagacgttatgccaataattgagcaattaaatcagaaaggttatgaattaacagtcattgctaaagaaaaagaatgggctaagctaaagcaatttaaaaatgtatcttttgttcctgcaggaaataatcatatagtgagacatatcaagacgataagtacagcaaaagtgattgtgattgatacatattatcttatgctcggagggtatcataagaaaaaaggacagaccatcatccaaacatggcatgcttcaggtgctttaaaaaattttggtttaacggatcatcaagtagatttaaataataaaaaaatggttcaacaatataaaagcgtttataaggctactgattattatttagtcggtggagaagagatgagtaaatgttttgaaagtgcttttgacgctaagcgcactcaaatgcttaagttgggtctacctcgattaaccaaatattttaaactagaccttaagacggagcaaaaaaatttaaaaaaatattataatgttcccaataaattagcattatatgtgcctacttatcgtgaaaatcaaatggataatcgtcaaatagataaagtatattttgaaaagcaattacccaattatactctcattaatcaacttcatccatcaattcctaatagtgagcatattgcgacaacgtcagaactaatgatgatggctgatattattattagtgattatagctctctaccaatagaagctagcttactcaataaacctacattattttatgtgtttgacgaaaaagagtatgaagaggtgcgtggattgaatcaattttatcgcgatattccaacattttataaagtgaaacatatagatgaattagtgactaagattaaatataatgaaaaagaaataaaaccattatttaaaaattggcataaatataatagtgaaaaaagcttagaaaacgtattgaaatttattgaaaagttggtgaaagaatgaaattagcggttattattccagtatacaatgctgaaaatacaattcgaaaagcagttaaatcgattgatacaacacatgacgtagaaattatttgtattaacgatggatcaacagatcgtacaaaacaagtgttaactgaattgcaaaaagaagttaaacatctcattgtttatcatcaagacaatcaaggagcggcaaaaagtagaaatatgggcctttctgcaatgtcagatgatatcgatgcgtttatgttcttagatgcagatgatcaatttttacctggaaaaatggatcaaatgattcaatattatgaaaaaaatgagcatctagatattgtgattgggcaaatcggtagaggattgaatggcgactggaaagttattccaacacacgaagacattcatcgtgaagcaatagtttctttagcagaagcgccagaaatacttcaatctattggaccaggtggcaagttattcaaagctaaatttaatacactaagattcgatgaagatgtagtattttgtgaagaacatacatttgtcactcgtgcttatttaatggcaagggatatccaactagttccttttatagtatatggatacaatgagcgagaaggttctattacagatcaacgtgcagatacgtttatatcttacttagaagatgctagaaaagttcgacgtgaagtcatggatatgttattacttgtcaacgaaaaagcatattatagttatcgaatggatgacttaattgtcagctatctcattcaagcatatttaataaaatacagtaaagtgacacttcaaattatagacaaaatcactcaatatatcagagatatgcaacatacaaattattctggagaagcgttgtttaggatagtacaagccgtagagcaaagtgcaactcattggacacgtgagacatatgagttatggagacatacacttattgatgtaggaattgggcgaccaggttttttacgttttcaagcacaagtaatgcctaaaaaaatagcattcagtggaaagcaatcattgaaacgtatgatgaataagtaaatgagtaaggggcaggtcaatataaaattaatggtatgttaaatatatttatgctaaattaagattattaattaatgttaaatatttgtaaaggagaaaggaaatatgagaagagtcattacatatggtacatatgatttattacattatggtcatatagaattactaagaagagctcgtgaaatgggtgattatttaattgtagctttatctacagatgaatttaaccaaattaaaaataaaaaatcttattatgattttgaacaacgtaaaatgatgttagaatctattcgttacgttgatttagtgattccagaagatggatggggtcaaaaagaaacagacgttgatcgttatgatgttgatgtgtttgttatgggccatgactgggaaggtcaatttgacttcctaaaagacaaatgtgaagttgtatacctcaaacgcacggagggtatttcaacaactaaaattaaacaagagctatacggaaaagatgtaaaataataatgtattgaaggcatatataaacgccttagaagtttagctatgtctcaatcattgattaaatcaagtagataacaataatttgtttgatttgactcatccttttgggagtgaacagtgaattcaaaacgaattctagagcactcctatttttatgtaataaaacattttaaataaaatgctatactaagaacaatcaatcaaattaccagttaaaatacatttaaattaggataaacactaaatataatatcaaaaatacaaatataaattgatgattaaagaggtttatttatgaaacaacacaatccattattttttctatttaaacgattgtcttggccttatggtttaataataactgctgttatcatttcttcgttaggaagtcttagcggattattgattccactgtttacaggtcgcttagtagataaattttctactaataatattaattggaatattgtcgttctatttgcaagtatatttatcattaatgcattacttagcggtttaggtatttacctcttaagtaaaattggagaaaaaatgatttatggtattcgttcattattgtgggagcacatgattaaactgaaaatgccattttttgacaaaaatgaaagtggtcagttgatgagtcgtttaactgatgatactaaggtcattaacgattttatctctcaaaaattaccacaattactaccagctattatcacattgattggttctattattatgctgtttattatggactggcaaatgactttactgactttcatagctattccaatatttatgggtattatgattccacttggaagacgtatgcaaaaaatttcaaaacatacccaagcagaaattgccaattttagtgggttattaggtcgtgtattgacagaaatgcgtttagtaaaaatttctaatactgaacaaaaagaattaaataatgcacattataacttaaatgaaatatataaattaggtttaagacaagcaaaaatagtagcgattattcaacctatttcaagtgtaattatgttattaatgatagccattattttaggatttggtgccattagaattgctacaggtgctattacagcaggtgctttaatagctatgattttttatgtgatgcagttatctatgccgcttatgaacttatctacactcgttactgattacaaaaaagctgtaggtgcaagtcaacgtatttatgaaattatgcaagaacccgttgaaccgatggaacagttaaaacccattgctaatatcaacattgagaatggagcacttgaatttaataacgtagaatttaaatatgatgtaaaaacgattcttgatcatgtatcatttcgtatacctcagggtgacattagtgcttttgttggtccttcaggttctgggaaaagtactatttttaatttaatcgaacgtatgtatgatatcgataatggtgatattacatatggcaatgaaagtatttatgatattccaattacaaattggcgtagcaaaattggatatgtcatgcagtcaaactctatgatgacaggaacaattcgagataatatcttatatggtattaaccgtaatgtctctgatgaagaactaattaaatatgcaaaactagcaaactgtcatgactttattatgcaatttgatgaaggatacgatacattagtgggcgaacgtggattaaaactgtccggggggcaacgacaacgtattgatatcgctagaagttttgtgaaaaatccagacatattgttacttgatgaagctactgcaaatcttgatagtgaaagtgaacaaaaaattcaagaagctttagaagtattgatgaaaggtagaacaacaatagtgattgcacaccgtctgtctacgattaaaaaggcaggtcaaattatttttattgatcaaggacgtgtgacaggtgaaggtacacatgacgaattaatgaaatatcatgagaaatatcatcaatttgtgactacacaaaatataaataaataatggatgtcgaacatccaaatatcacgatgataaagtaatctataattttacagtgtagatgaaaaaatcttagactgataagatatagttagtacacaaacacattgcttaaaaattaattgaataaacataaataaaattggagagaatgatattgaataaactatcaataattattacatattttaatagtgaagaatatattgaagattgtattaatagcttaaaaactcaaaggaatcaagattttgagatcattattgtagatgatggttctacggatcattcaacacaaatcttaaataaaacgttagcatcttatgataaagatgtgacgtttattcaacttgaaacaaatactggtcatgcacatgctagaaatatcgctttagacttagcaaaaggtcaatacgtgatgtttttagatgcggatgatcaattagcctcatatgctattgaatattatttaaatcatatcaatggtttagatacattaattgcaccggtacacaaatttacaatgcaacgtcctcaatatgtagataaagataagatacgtttgcagtatcgatcacatcattcatatcctaattcaattttacgaaaagaaactgcatgtaatattttatttagaaatgcaattattaaagcacatgacattaaatttaatgaagatttaagcatttttattgataattcatttgtattagattatctgaaatatgctgaacattttgttagaattgttaattttccgttttattatcgtggtgaagtatatgatccatttaatggtaatacattaagtgatcaagattttattgataaatttgaagactatacaaatagtttctttgatgctatacaaagaactacaaataaagaagttaagaaatttttagtccaaagaatgaaaaatgaaattaaaaaaggttttgatccttcgcttagagatattaaagcaagatatattgctttagaacacactctagttaaagtagtaaaagcactaaaatggaatatcattaaagatggtaagttgttatataatcttgaaatcatgtttttatctatggatgacattgagaatgcaagatatgtgaatgaattacgtaaaaaaacacgtttatttaaaagtattctaacaaacaataaaatgaaagaacgtgctaaatatcaacttactgataatgaaaatatggtagatccacatacgattatatttgagtcatttggtggtaaaaattacagtgatagtccaaagtatatatatgaatatatgcaacaacactatccacaatataaatatatttgggtcttttctaagcctaataacaatattattcctggaaatgcaactaaagtgaaaaaaggatccaaagaatattatgaggcttatgctaaagcgaaatactggatttcgaatgctcgattaccattgtatttaaataaaaaagagaatcaaatgtatattcaaacttggcacggtacaccgttaaaacgtttagcaaatgatatgaaagtggtaagaatgccaggaacaacaacagcaaattataaaaagaatttttatacagaagcatctcgttggaattatttagtatctccaaaccgttattctacggatatctttaagtctgctttttggatgaatgaagaaagaatttgggaaattggctatccaagaaatgatgtattagttacaagacaaaatgatactgagtatatagaacaaattaaaaaagatttaaatttaccaaaagataaaaaagtcattatgtatgcgccaacttggagagatgatgaattcgttaaaaaaggtcaatatttatttgatttgaaaataaatttagctaatttaaaagagcaaattggagatgactatgtcattttactaagaatgcattatcttattgcaaatgcattagatctaactggatacgatgactttgctattgatgtttcaaattataatgatatttcagaattatatttaatatctgatgcgcttattactgactactcgtcagtgatgtttgattatggtattttaaaacgtcctcaatttttctttgcttatgatatcgaaaaatacgataaaggtcttcgtggcttctatatgaattatatggaagatttaccaggagaaattattacagatgaatttaaacttgctgaagaattaaaacatttagatacacataaagaaaaatataaagataaaattgaagcgttctataatgatttttgttcaattgaaaaaggtcaatcttctaaatttatagcagactatattcataatgatattcatgaaaatgaatcataaaatcaaatgacataaagaatgggaaaaatttactttgaattcgttttcccattctttttctatataaccgtattaagtttaaatggtatttatgataaataacatcaaaaaagaaaaatagacaattattttattaaatatgttattttaacgaacattttctcgtggtataatgttaaatgtattttttacagaacattagttgttattttatgaaaatagtacggttctatttaagggtaatgtgatacatattaattttaaaatgtgggtaggtgtcttatgtttttactaataaatatcattggattacttgtgtttttaggaatagcagttttattttctagagatcgcaaacatattcaatggaagtctatattaatcttagttcttttaaatgtattcttagcatggttctttgtatatttccaaattggaagatcgattgttgaaggtttagcagctgccattgcttgggttattcaatcagctcatactggaacaggttttgcattcagtagttttacaagtggtaaacaaatggatatggcagtgagtgcattatttccaattttattagttgttccactatttgatattcttatgtattttaatattcttcctaaaattattggaggaattggttttgtacttgcgaaaattacacgtcaacctaaatttgaatcattctttggtatcgaaatgatgtttttaggaaatacagaggcgcttgcagtctctaatgaacaacttaagcgtatgaacgaaatgcgtgtattaacagttgcaatgatgtcaatgagttctatttctggagctattgtaggtgcctatgttcaaatgattcctggtgaattagtgttaacggcgattcctttaaatattattaatgcaattattgtcgcttctattttaaatcctgttactgttgaagaaaaagaagatattatctatagcattaataatgatgaaaaaattgaacgtcaacctttcttctcatttttaggagattcagtattaaatgcaggtaaattagtattaattattatcgcttttgttattagttttgtcgcgttggctgattttttagatcgttttattaatttgattactggattagtaggcagttggatgggtatgaaaggtagttttggtttaaaccaaatcttaggcgtctttatgtatccatttgctttattgcttggcttaccatggggtgaggcatggatagtggcacaacagatgtccaaaaaaatcgttacaaacgaatttgtagttatgggtgaaattacaaaagtaattgacacatatagcgcacatcgtcgtgcagtgatatcaacattcttagtttcatttgcaaacttctctacaattgggatgattgttggtacattaaagggtatagttgataagaaaacatcagattttgtttcaaaatatgtaccgatgatgttattatcaggtattttagtttcactacttactgcagcatttgttggtttatttgcatggtaaggtattaaaatttaaatcattttatagtcaaccattaggagtgaacattgaattcgaaaaaaattctatgtcactcctatttttattattcattttattgcatgataaaaaccaagcatgcaaagtgaggagacactttatatacttggtttttatgggaaatgaatattaatgtacttgtaacggtaaggactaggtactgtcacagtacttcgagcaaaatttgttttgttactataaacaacacaaaggagataacttcttgtaattaagaagttatacatagtatagcaaactaatatttataagtaaacgaaaaattcagaaaatttccacgtattttttattagtacattagatttaaagatgaatatgtatcttatttaaattaaatctttatattttaagataattaaaatttattaatacatttatttttaaaaagcatattgtagggaatgatgagactatgctaacattttaatcgttatagtcgtaaaaggagtgagtgtttttgaacaaaaatataaaaaatatacttttagttatactaggctcttttatcttttcagcaggagtcaatgcatttattatatcaggtaatttaggtgaaggtggcgtcacaggtattgctattgtattatattacgcttttcatatttcaccagcgctcactaacttcgttgctaatgcaatattgattgttattgggtataaatttttaagtaaaaaaagtacgatattaacaattattgctactgtacttatttctgttttcttaagtcttacagaatcatggcacgtagaaacaggtaatgtcatcatcaatgcagtatttggcggcacaagtgttggactaggtattggaataatcgttttagcaggtggcactacagctggaacaacaatattagcaagaatagctaataaatacttagatgttagtacagcatacgcattattattttttgatttaatcgtagtagccatttctttaacagtactaccgttaagtaaagcattggtaactgtgatttcactttatataggcacgaaagtaatggattatgttatagaaggacttaatacaaaaaaagcaatgacaattatttctagcaaacctgaagaggtagctaaggctattgatgaacaagttggtagaggccttactatattgaatggacatggttattatagtagagaagaaaaagacgttttgtatgttgttgtagctaaaactcaagtaactcgtgccaaacgaattataaaaaaaatagataagaatgctttcttggttattcatgacgtgcgtgatgtttatggaaatggttttttaatcgatgaataaaaaagggccctaaaaatttgaggcgttttatgtatatctcagatttttagggttattttttataatcgtctcatagtaaaaagaatagtcaaaaatgtgtataaatggtataatagcaataattaattgagaacgattatcaatagatgtcgtaaatattttttgtacaaaggtagggcctatatatgaatcgtttaaatgcatctcaagtagatataggatatagaaatacgacaattataaaagaattagatgttcaaatacgtgatggtaaagtcacatcaattattggaccgaatggttgtgggaaatctacattattgaaagcactctcaagactgattgaagtgaaaaaaggagaagtattacttgataatcaaaacattcaacatcaatctacaaaagaagtagctaaaaaaattgcaattttacctcaaactccaacagtgactgacagtataacagttgaagaactcgtttcatatggacgttttcctcatcaaaaaggatttggacgattatctaaaaaagataaagatgaaattgaatggtcattaaacgtaacaggcattacagaatttcgtcatcaatcgattaatgatttaagtgggggacaaagacaacgtgtatggatagcaatggctttagcacaaaaaacagatattatttttcttgatgaacctacaacgtacttagatatttctcatcagttagaaattttagaattggtgcaacatttgaataaagaattagggtgtacgatcgttatggtcttacatgatatcaatcaggcaattcgattttcggattatttgttaatcatgaaagaaggacacattatagataatggacctactgaccaagtattatctaaagagatattagaaagtgtgtttaatatagatgcagtattaggaaaagatcctagaacagggaaaccacttttagtcacttacaatttacttgaaaaaagataagattgattataacttcagcaatatagctacaattattatgatgttggatacctatctcagtcatttttaatgtataggcagtcaatgactaatattttgtctaatacacaaatattcgcgctttcagataagttattttataatgaaaacacacgttgattaaggttcactttaataaaaaatcaaattcgttatttaattgattgactggagttgaaatgatgacaactatagttattattagtcatagtgaagaaatagctaagggaactaaaaatttattaaataaaatgacaaatgacataaatgtgattgcttatggtggagtaaatggtgaaattggaacttcatatgatgatattgaacaattgattaatcagttagatgatgatgcattatgtttttatgatttaggatcatcagaaatgaatatcgatttagcaattgatatgtataaaggtaagtatcatatttacaaagtaaatgcacccattgtagaaggaagttttacagcagcaatgtctttaagtgttggtaaaactgctaatgaagcgattcaagaagtgaatcgttcttcatttaagtctacagcatttaaataagtaatgataaattttgatgtttttttttatataaaaaaaaggttataaaatgattatccaaaatgaatatggtaaaataaatagcatgatattgatgatgaaagtaggtggacattatgctacaagaagatattaaattttacgttctgaacggtaaatttgaagaaattaaaaatataatgtccaatattgattttatggaattcgaagaagtatatatatcctgtgctcatgaacaagaaaacattatgttttatacttgtatattagatatgatgaaggctaatgaaacagcagaattacatgatttagcatttttattattagtctatcctttgagtgaagtggaaggtgctttagaagcggcatattatcatgcagatgcttctattcagttaacaaatggtaaagaaataaaaagtttgcttcaaatgctattattatatgctatacctgatccaattatttcagattctgaagcgtttaaagtagctaaacaaattttaaaattagatcctaataatcatgtagcaagaaatgtgttaaaagattcagctaaacgcatggataatgttatagtaaattttgatgaattaaagaaatttggaagttcaaaataatatagtgaaataagagagttagataatgaataaccatagttattcattttatctaactcttttttaataatattttacttagtaactcaaatataattttttgtgacaaattattaaaaatattaaattttttaaattgtttgtaagggtattaacactagtatttagaagcgataagcgttgtctcacaacgtttatgcactgttgcatattattattagtacgttataattttgaatgtgtcaaaaataaggaggttaatcaatacatggggttgaataaagaatctataaaaataggttttgcttatgtggggattgtagtaggcgcaggattctctacagggcaagaagtaatgcaattcttcacgccttatggtttatggtcatatataggcgtgttaatatcaggattaattttaggatttatagggcgacaagtcgctaaaattggaacggcttttgaagcaacaaaccatgaatcaacattacaatatttatttggtcaaaaatttagtaaaatctttgattatattctagtctttttcttatttgggattgctgtaacgatgattgcaggttcaggcgcaacgttcgaagagagctttggtatacctacatggcttggcgcgttaattatgacggtcgttatttatttaacactattattagactttaataagattgtaagagcgttaggggtcgttacaccattcttaattgtcatggtagttcttattgctatatattatctattcgctggaagtatccctatcagtaaagttaatagtacagtagatcatccaagtttattcttaggtattattagagggttaatgtacggtggattagcttttgctgtaggatttagtacggttgtggcgattggtggagatgcatctaaacgtcaagtatctggtgccggtgctttatttggcggtgtagtgtatactgttttacttgcactgattaactttgcactacaatcagaatattcacaaattaaaaatgaacaaattccaactttaaaattggcgaacgaaattcatccatggcttggattagttttaacagtgattatgttagcagtaatgtataatactattttaggattgacttattcgtttgctgcacgtttcactgagccatacagtaaaaaatatcatatatttattgttattatgatgattgcagcctttattttaagttttgttggttttgcagatttaatcaacttcttatataacattatgggcgtagttggattatttattgtggtagcagtgcttattaaatattatttacgtaaaagtgataacaaagaccacattgcttaaaattgataaaataaataatccataaaaaaactgcctacaaagttaaataactcatagacagtctaaagcaattcgtgtaattaacacgaattgcttttttgcattttgaacgtagcgtataatacatattgtaattaaagtagtaatttagccataatatatttattaaaatattgattgttgatcagtaatttatttttaagttcgccttcaatattaaatccagcgcctttaagtagcatgagtgcgtgtgtattttcaggaacgactgaagcttgaagacgtttaatattatggttaagagcccaagcttcaacagcattaattaaagcaagtccaataccttttttttgataaaatttagtaacaccaagtgtaatgattgcttcgtgttgtgtacgttcgtatttttcagtagtgacgaatatacatccaacgagttgatcatcttcttcagctacatatatggtatttctcggagaagtgataacacgctctagaagattactaatagaagaaacactagggttaaattctccaggattataaagtgtataatcagattcatcatatattttagttaataatgttgtcaaagcttcagtatcttttatactaatttcacgaataatatgagccattcggcttcctcctgagatagtaatataacatatattataccaattatttaaaaaatatacatatttagaattttaaaaaggagtaacagaataatgaaacctaatgtattattagcgggtggtagtggttatataggtaagaatattagcagtgcgatagaaaatgatgcaaatttgtttgctttatctaaatatccaaatacaaaaaaagagtttaatcataatataaaatggctaaaaaaagatatttataattatgaagatgttaaatcagcaatgtcaggtatgaatattgcagtattttatttagatcctaataaaaattctgccaagcttactcaagcaactgcacgtgatttaaatctcattgcagccgataattttgcaagagcagcagcacaacaaaaaataaataaaattttgtacgtaagcggtagtcgctttgataatgagacaatacaatgtttaaaaaactatggtgttcctgtagaaacgactgagacctatatcaaacgctctcatattaatgttgagttacaagtgtctaaatataatgatatacggacagcattaagaatgatattacctaggaaatggtctttagaacaattagtcgcttatttttttaaatggctgaatgatacacgtggtacatttttacacacgaaatatatagaaaatcgatatataatatatactcgtaatgagtttaagcctctattagtaatgaagaaagaagtaaatgataatagtttaattacatttaatttagtaggcggttcaattataaaaaaacgttctaaaaaacaaggaaaattggaatttcgtcaaattaaaggaacgcgtttagtaattgttcaactatatgattatattcctaaattgttatggccactctattatttttttcaagctcccgtacaaggtttaattatgagagggtttgaaattgattgtcgtattaggcatttcaatggacgtgtgcaatcaggagaaaaaatgaaatatacaaagtgataggatgaaaacacatgcaaatattattagtagaagatgatcagacgctttttcaacaactaaagaaagaattagaaaattgggatttttttgtttatggtgtcaatgattttagtaacgtaatggaaacatatcataatgttcaaccagaaatcgttataatggatgtgcaattacctaaatatgacggattctattggtgtcgtcaaattagacaagtatctaatgtgcctattttatttttatcgtcacgtgataatcctatggatcaagtgatgagtatggaattaggtgcagatgattatatgcaaaagccttttcataccaacgtactaattgcgaagttacaagcaatttatcgacgcgtatatcaatttggcgcagaagaaagacgtacattaaattggcaagatgcactagtagatctttcaaaagatagtattcaaaaaggcgataaaatcatttatttatctaaaactgaaatgattattttagaaatgttaattcaaaaacaaaatcaaattgtgactagagatacattaattacagcgttatgggatgatgaagcgtttgtgagtgataacacattaacagtcaatgtaaatcgattacgaaaaaaattatctgagatcgatatggaaacagaaattgaaacaaaagtaggtaaaggatatatggcacatgagtaatgtgaaatggttttggctatttcttaaaacacgaagtaattggatattttggattatatttttgcagtttgtgtttttagggatggcatatatagactatgatatggcaattgaaagtgtagcgtacattgtcttattaaatataggtttaacttgtatatttcttatttttacttttttaagagaagtaaaattatatcaacatttttataataataaggaaatcgaagaaattaaacataaagaattagctgagaatccatttcaacaggaaatggtggactatttatatcgtaaattattgtttcaaaaagaaagagctactgaacaacaaattcatatacaagcgtctgaacaatcgttaactgaatttgttcacgatattaaaacacctgttacagcaatgaaattattaattgatcaagttgaagatatggaacgtaagaaagccttactttatgaatggtcaagagtgaatgaattattagataagcaactttatttaacacgtcttgaatctaaaaatagagatatgtatttcgaaaaagtaccattaaaacgtttagtgatcgaagaaattcaacttacgcggcatatcagtcaagttaaaggtattggctatgaattagaatttgacacgaatccagaagtatttacagatgtaaaatggtgtcgcatgatgattagacagattttatctaattctttgaaatattctcaaggaaaagatattgtgattcggtcgtttgctaaaaaagaccatatcgctttagaaattactgattatgggcgtgggattagtgctaaagatttaccacgtatttttgaaagaggctatacttctaccgcaaatcgtaatgaaacaacttcttctggaattggtttatacttagtagaaagtgtaagacatccattaggtattgaagtagaggtcgagtcgacggtgggtgaaggaacaacatttattttaacgttccctatgcaaaacgaagtcatagaaagaatgtcacaagagaaattaagtctatcataaagacgttgttaaaatagtatataagtgcaattgttcgctttatcgcaaggagatattggactttactataaaaagtttggactaaaacttatataatatttaaagtaaatacataaattaagcttatggaaatatcattttagtgtaataagtgagtagaacattgagtgaaacctgggactttatagtgacgtctcaggttcatctatatcattcaatcgttaaaatatatgatagtgagggacattctaaattgacaatattacaagcaaagcaaattgttaaaacatatgggacaaaacaaacgatacaagaagtgttaagaggcattgatttaaatattgaaactggagagtttgtttcaattatgggaccttctggatctggtaaaacaacattacttaatgttttaagttcaattgattatttatcacaaggatctgtaatactaaatggaaaacaattggaaaagttatcaaataaggaactatcagaaattagaaaaaaagatattggatttatttttcaagaatataatttattacacacacttactgtaaaagaaaatattatgttgcctttatcagtacttaaattaaataaggaagaaatgaataaacgttatagacaaattactgaagcgcttaatatatatgatattagtgacaaatatccgtctgaaatttcagggggacaacgtcaacgaacatctgcagcgcgtgcatttattacatatcctaaaatcatttttgcggatgaaccaacaggcgctttagactctaagaacactagggatttactcacacgttttgaaaaaataaataaaatctatgatgtaactattattatggttacacacgatccacttgcagcaagtttttctaatcgtgttgtaatgttgaaagatggcttaatatttactgaaatttatcaaggacaagataataaacaattattttatgaagaaatattaagagcccaaagtatattaggtggcaagatttatgagttttagctatattatttggagaaatttcctaagaaatatcaagcactatgctatttatatgttttcattagtcattagtaccgttttatattttagttttattacgattaaatatgttcatcatctccatatacatgagtctttatctatgattagagaggggtctaaaataggaagttattttctatttataatcatcgttgtctttattatgtataccaatattctttttattaaaagacgaagttacgaattgggactattacagattatggggttaaataaagtaagtattatttatatgtttatgttagaacaattgtttattttcttaatcactgcagttttaggtgtgataatagggattgttgggtctaaaattttacttatgattatattgaaattattaggtatacatacctcggtttcgcttgtttttagtgtagacgctataattcaaaccttatttattttaatcattgcatatattttaattattcttcaagctatcattttcttaaataaatattctgttacgcaattaatggagtctgaagaatatatagatgaaacaggtaaacatattacatttggagaaattattctaggaattttaggtattgttttcattttggcaggatattatttatccacacgatttgttgaattattagatgatatcgtattaccttttattattttatttttaactgtgatcggagcttatttctttttcagaagttcagtgtctcttatattaaaaataattaaatcatttaaaagtggaaatgtaactgtaaatgatgttattttcacttcttcattaatgtttaggattagaaagaatgctttctctttaacaatcatttctattatttctgctattaccgtatcggtcctatgttttgcagcaattagtcgaggatctttaagtaaagaaatttcattagaatcaccttatgaagtaacaacgaacaacgacatcttgtctgaaaagttaaaatatcaattagagcaacagcatattgcatataactataattataagcaagtagtgtacacgcatttatataaagattatctatttgatgtaaatgcagctagaccttattcggtgactgtaacaagtgaagattacttttcaaatgtttctttgaaaaaaggacaagcagatttaattatcccagaagatgttattcctgaattaactaaacatcgaccacacgggacaacactgattggtacgaaacgacatcatactaaagttcaactgcgaaaagtgattcataaagtttattttaaagagagtatagatttaggtggaccgacactcgtgcttaataacgaggattatcaatttataaaacaacatgttaaaaataaggacatcatttctcaacatggttttgatttaaaacatacaaaagatatacctagattagaaaagactatcaatcacatgaatcagaatttaaaaactagaagtcagatagcaagcgaaatttcaagtttaacaggaattttattatttataagttcttttttaggtattgcatttcttatagcaactggatgtattatctatattaaacaaattgatgaaactgaagatgaattagaaaattattcaatattacgtaaattaggttttactcaaaaagatatggatagaggtctaaaattgaaagtggcgtttaactttggactacctttagctattgctttacttcatgcatattttgcagcacttgtatttatgaaatttataggattcacaaatcaaacgtccatttttatcgttatgattatttatacaatcgtatatagtatgtttgcatttattgcttataatcattctaagcgaacgatcaatcactcaatttaagagagaatatttcgagtttgtaaagaatttgtaaatttattgtagagatgaaaaatttatgatattttcaattagagacaacttaggcgttaagtagaagtgtatcgtaactggtataacattatatttacataaattttacaaaagctttctaaataatgttttaaaataagctattgtaaatgtagctcatttttaaattgtcttaaattaaataataaacgtgtgattgatagcaatcgctaaaatggaggcattataatgttcactaagaaaaaggataagtttatggttcaattagaagaaatggtatttaatctggaccgtgcagctgtagaattcgggaaaatggattttaatacccatttagatttaaaagcttattctgataacattaaaacgtacgagtcacatggtgacgaacttatgcacaaagtcattagcgacttaaatcaaacatttatcactcctattgaacgagaagacattctatcattgtgtaatgcaatcgatgatgtacttgatgcaatggaagaaacatctggaatgtttgaaatgtattcaattgaatatactgatgaatatatggctgaatttgttgacaatattcaaaaagctgtcgctgaaatgaaattagcagttggtttacttgttgataaaaaattatctcacatgagaattcattcaattaatattaaagaatttgaaacaaattgtgatggtatattaagacaatcaattaaacatatctttaatagtgaaaccgatccaatcactttaattaaaattaaagatatttacgaaagcttagaaaatatcgctgataaatgtcaagctgttgctaacaactttgaaacaattatcatgaaaaatagctaagggagttttaaattatggaatatgtattagtcatcactatagctatcgttgcattttctttagtctttgactttatcaatggctttcatgatacagcaaatgcaattgctactgcggtttctacacgtgcattgacaccaagaacagctattcttctagcggcaattatgaactttataggtgcacttacttttacaggggtagctggaacaattactaaagatatcgtagatccatttaaattacaaaatggtctagtagtagtattagcggctattatcgctgctattgtttggaatttggttacttggttatatggtataccaagttcttcatctcatgccttaatcggcgctattgctggagctgcaatagctgcacaggggtttacagtattacattaccaaggttttactaagattatcattgtattaattatttcaccaattatcgcattttgtgttggttttatcatgtatacaattgttaaaattatttttaaaaatgcgaatcttacgagagcaaatcgtaatttccgctttttccaaatgtttactgcagcgcttcaatcgttttcacatggtacaaatgatgctcaaaaatcaatgggtattattactcttgctttgattgtagcgaatttacaagatccatcgaatgtggaaccagtattatgggttaaaattgcttgtgccacagcaatgggtctaggaactgcaattggtggttggaaaattattaaaacagtaggcggaaatataatgaaaatacgacctgctaatggggcggctgctgatttatcttcagcattaacgattttcgttgcttcatcattacactttccattatctacaacacatgttgtatcgtcatcaattttaggtgtaggtgcatcaaatcgtgcaaaaggtgtaaagtggaatacagctcaacgtatgattattacatggattattacattgccaatttctgctattttagcagcaattatattttggattttaaatatttttctttaaggtaaaataaccacaaaataagcttgagacatgtttatgtctcaagcttattttgtggtttgaatcatattaatgaatatagttatagttagaaactaatgaagcaggaatcacacgagtatctgtgttataagggccatatgtataattcatttctgaaattagaatactaccatctggattcacacgctccacgtatgctacatggccataatacccagcagtcgattgcataattgctccaacagtaggagtatgattaacaatataaccatctgaggcagcattataagtccaatacttagcatcagaccaatatgtactaatgggtaatccagcttgggcgcgacgattaaacacataccatgtacattgcccagcagtgtataaattttgatggttaaaggttggtgaagcattagtagatgatgagtttgtagtactcgaactacttggaatttttaatacttgaccagggtaaattaaataatttttcaaattatttgcattcattaagttagtaactgaagttccatatttattagcgatacgagaaagtgaatcaccagattgaacagtataagtagtagaagacttacttgataaactacttgatgtagtagatgttgtagttgacgatccattaatagttagtacttgtcctggaaaaattaaattaccatttaattgattatttcgtttaagctcatcaatagtggtattgtatttgtttgcaatactccataaagaatctccaggttgaacagtatgttgtgttgatgcttcagcatgatgagagaaaaatgctacagctcctgacgcaatagataacgtaaaagctaactttttcaaactacgtaccctccttgaattttaaaatttatttttagaatttaatattgttaaatttgtataatttacctttttatatcacatgcatatactatcaaaaaaatataagaatatgtggattgttattatcttgtaatatgattaaaagtaatacgattttttgtaaatagataaaaacccttgatacagtagtttttaacagttttatttagataaaattaaattgctttaaaaagaaatttgtaatatttcttacagtaaaattgaagcaaggacgtatcgtgtaagaggtaagttgaattgtttttaatgatttaaacttgtaataatttttgtattttcttgataagatacctacttaaaagtaaataaattatactatttttttattctcaacaaatattgtacaattaatgtaagatactatttaaaagaggagtataagatgccgagttcttcaaatttagtaaatcatcaacatcaaaacgcacgttcaaaagataatactcaacaaaaccatgcatatcgtaaagtttggctattttttacatattattggcttatttttgggattggctgttatttaggtcaatatttgcctgtagaatggcgacgtcctttatcaatcacattatttgttattgtattagcgacgttatttattaaaagagcacgtaaatatggtcttattatttcgcatatctatgctattattattggcttattatcgtatgcaacattttcaatgtatatgcaaaatttaggcgcagacgttttttataaaaatatattgttagccattatagcgttcattgtatttggaatattggggtattttgtcattaatgatgcttctagcttaggtaaatatttatttgtaacattaattgcgcttattattgctagtctagttggcttatttattcgtaattcaatattccatatcgttattacaatggttagtttagtcttgtttttactatatacattatttgattttaatcgtatgaaacatggtagatttacgccaagagaaatgggttttaatttatttcttaatttattaaatatcatcaaagatatattgaatttagcaaatcgctttaaaaactagacattcatatttataataagttgaatatttagaaaagatgttctcacattgttttcaaaacattttaaataaagagtagtctaaagctgtttattttattaaagtaagaaggcaattatagagcatcttttttaaataattatgaaatgtatttaatataaaattaaacttaatttaattttatacgtatttttgatttagtattaatgttgtgatagatttacatttaaacacttataaattagcatttttatataaacacattaaaagaaggactaccaagattagaaagaggttagtatatgtctaatgggtattttcacgtacttactaagcatgaatatcaaatgacacgttgtcaagatggtatcatattgctgttcccaataaaaggttcattagaaattcaacattttgccaaaaaagtgacgattaataacgatatctacgttataaacaataaagatattttttcaattaataagaatgagaaaacaataatgatttatattgcaagtgattggtttaaagaagaaggatttaatttctttgattataaatattcaattaatttagttaaatctattaatgcaataaaaaaagcattattacagataacaatgaatcatattaatcataaatctgtttcagaagataacaaatacatagttgacattgttcaaattattggaagacaaggtagtgttgaaatagatattgctaatgatcaatataattatgcttattatggggagttaagtgaagtattagactatattaacgaaaatattgaaaagaaattaacattaaaagacgtttcatctaatctatttacatctaaatctaatttatcatcacaatttacacagttgttaaatattagttttaaaacttatgtagacactttgaagattgcaaattcatttgaattattattgaaaacaaacgatacgattagtttaattagtgaaaaagtagggtttagtaatgcatcaagttattctaaaacgttcaaaagttatatgggaatgacaccaaatgaatatagatcgtgtaataaatatgaaaaaatgatttttatggattatgaaactcatattgatgatagtttacaaaatataagagatatgattcagtcacaacaatattattatcaaaagaaaacagaacataaaatatatatcgattcaaaattagatacgtttattaaaccttatcaatgtgtagtacagatcaatacgattgaagaaataaaactgttatttttagagaaatatatcgattatcttgacgagagtccgtcattaatgatttatgtaagagcggatatgaaagaaataaaagaacacttcactgttaaagaacttcagcgaatatttgaatatattattagaaaaaatctaaatataagttttaaacttgaggatttaaatctaattgacttccttgaaatgacatatgaaaatgtattagattatcttgaaataaaccaagttgaagtaaatgtaaatcacgaattagggattgtttttgatttagaaaagattgatttaaaagccatttatcgtatgatattaaaaatacaacataaaacaaatcggttttcttttggattagaaattagtaacttgctaaataatccagttttgtttaaaactttagaatcgcaaattaaaagagtgaatttccaatttctgtttattgataattcaaaactaaatcaaccctatttaatagaagataataatcgtttattagtaaagaatatattacgatatcaaaatatacgtgaaattttaaatcacattgatttagaaaatcaaagaatcatatttttaaacgttgaaaatcatgcgtttttaaatagtgaatataatgacttaaatagtagtgccccgttaattgtagaaacaaacattaaatcagctcaacactttgacggtattggtttcaattttagacaggatagtcatcaatttaatgctttacatctttttgatgaaaaaggttttaaaacaatattaggaacaatgatggcccatatcatgacgcttagtcaggaaccaaaatacattaaagatcactatatagtgattgaaaaagaaaataaattcatactatttatatatgattggcgtgttctagaaagtgaatcacgaaatgctaattatgaaaaaactgatatatatgtagattttaaacataagacaaataaaaatcatcttataaaaattcaaaagattgatgattataatggcaatattaatcatattattactgaagacatacgtaatcgttatcaatggtctaaaacattcttgaagaaagtaaatcgtttattacattcttcttttaaaattagagaacatgactttaataaagaggcattacaaattaaacttgattataacgggctttatataattgagatatataaataataaatttcatctcaaaaaagttttgcacaacaatatttgagtttgttggtaaatttaacaaaaaattcaaaacaaatgcaaaagacagaactccaaaattaaaggataatatatgttgaattgttcgcttttattggaggtgcaaatgcttgagtaacgatgaattaaatcgcttgctgaaaatctataaacaatataaagcgttgtctggatatatagacaaagaatacaaactaaccttaaatgatttagctttattaaaattagcttatgaatacacagcagacgatcaaattttaatgcaaacattcttaaaagttgcaattgaagaactagaattaagtagaacaaaattacttgtttctatacgcagactaatagaaaaagagaaattaagtaaggttcgatcaacagaagatgaacgtaaaatttttatctatatgaacaaatctaatattgatcaatttaatgctttatttaatgatgtagaaagatttttaagtaattaactaaatgaattgggagagtactgacagggggatgctttgtcagtattttatttttttaaagaagtaacattttttcaatttagacaataaattattaatactatataataagtagtattgagtaagaaagcgagatgacaatatgggacgtaaatggaataatattaaagaaaaaaaagcccaaaaagataaaaatactagtagaatatatgcaaaatttggtaaagaaatttatgtagcggctaaatcaggggagccagatcctgaatcaaatcaagcattaagacttgtgctagaaagagcaaaaacatattctgttccaaatcatattatagatagagccattgataaagctaaaggtggtggagatgaaaattatgaccatctacgttatgaaggatttggtccaagtggctccatgattattgtagatgccttaactaataacgtgaatcgtacagcatcagatgttagagcagcatttggaaaaaatggtggtaatatgggtgtatctggttcagtagcttatatgtttgaccatactgcaacgtttggtatcgaagggaaatctgccgatgacgtcctagaaacattgatggaacaagatgtagatgtaagagacgttattgaagaagatggcttgacgattgtgtatgcagaacctgatcaatttgcacaagtacaagatgcactacgtcaatcaggtgtagaagactttaaaattgcagagtttgaaatgttacctcagactgatattgaactttcagcagatgatcaagcaacacttgaaaaacttattgatgcacttgaagatttagaagatgttcaaaatgttttccataatgtggacttaaaatagtgaaacacacggcttcgttttggatacaatcgttagacttggaatctcatccagaaggtggatattataaagaaactattcgaccagagggtataaagaaagaagaaagggcatcttttagtagtatacttttcttattaaaagcagatgatatctcgcattttcatcgtatagatgctgatgaagtatggtattatcatgctggtgtatcactagagatacatatgttaactgaagatggccagtatcgtagtgtcttgttaggtccaaatgtagaccatggagaagtgctacaatatgttgttcccaaaggaaccatttttgcttcgagtgtacctcattcggaaggttatagtttagtaggctgtatgtgtcaacctgcatttgaatttaagtattttgaattattcacacaagatgagttgatagaagtatatccacaatatcgccgaatgattcaaaaatatgcattgaaaaacattgagtattaataattagacacttcattcatctagttaagtataactacatgaatgaagtgtcttttttaaaaagagatagaggacaccattgctgacatgcttctattcagcagtaccaaaaagttcattagctaattctacaacataagctaatttgttccattgctcttgttcagttagagcattcccttcttctgtagaagcaaaaccacattgtggactaatacagatatggtcaatatttacatattgttctgcttctttaattctttttttaattgtgtctttattttccaattcacctgttttagaggtgataagtcctaaaactgcataagcattgtcattaaagaaacgaagcggttcgaaatcacctgaacgttcatcatcatactctaaaaagaaaccatttaaattttctttaaataggtaaggggcgatggcttcatatcctccagaaattgcccaagttgatttatagttaccacgacaaatatgagtagtcagaattaagtcatttggcagtccttcgatcgctttattaatcactttataggccaaatcacgtgcttttagtttttcatcttcagaacgttgacgacctctcactttttgagtaccgtcagttaaaccagcccagtatacgtcatctaattgaatatagcgcgctcctaagtcataaaatgcttgtagcgtttcatgataaactttggcaatatcatttgcaaaatcttctatattagggtaaatcgtttcatttaaaatattagggtggaataattgatttggactaggtattgatactttagcagttgcgcgaccagccacttttttatataaaaacttaaagtgttcaaagtgtggatgatttgaattaaatgatactttgtccacaattctcacattatgtgcacgtgtttctacaccttcaaattctaatccgtggtcaggagtatatccttatacgccattaatattctctagaaaatcaaagtgccaccaacttctacgaaattctccatctgtaatgctatgtaaaccaatctcaatttgtttttcaataatacgttcgatttcttcatcttcaatacgtgttaattcttctaaagataattcgttattattaaacttaaatctcgcttcttttaggcgtttaggacgtaataaacttcccacgtgatctgctcgaaaaggtctaactgtcatatataaaacgctccttttatttagaattttcagataatatagaataaaactatcaaatcttagtgtttttgtcaattttacctaaaaatttaatagttgtagtaaaatgaaattgaaaaattaataaatttatatgctaaaagtaataaagcatggcataagatgacatggtttacttagtttaatataataatgacaaggagttggtggctttatgaaaattaaatacatagataaacgtcactggcgtcgcctaattgaacgtgattacatagaagttaaggtaaataataataggtttaaaggtattattggcttggtcacgatgaaaaaggtgcgtgagcctttagaggtgacggtggtcgatcaaaatgtagttgtagtagataataactataaatggctacaaattttgccagaaaaaaaacgctatagtattactgcaatgtttgatgataaggggaatccattagagtactattttgatattaacattaaaaatattactcaaaaagggaacgcgagaacattagatttatttttagatgtgttggttttaccatccactggtgaatatgagttagtagatgaacatgatttagaactagctttgaaaaatggacaaattacgaagaaacaataccatgaagcctatattatcgctcatcaattgatgattgagattgaggacaattttgcagagatacatcatcgaattatgcattgttataaaaagatgataggtaaattaaataagcataagaaagcgtaattatatttctttaatactaaaacaataatgaaatagtatcaattttatttaccatcatagccgtattcgtggataaacataagggggaagctatgaaaattgaagattatcaattactaattacattagatgagacgaaaacgttaagaaaagctgctgaaattttatatatatcacaaccagcagtcacgcaacgcttaaaagcaattgaacatgcgtttggagtagaaatatttattcgtactaaaaaacaattaattactactacagaaggtgcaatgattatcgaacatgcacgtgatatgttgaatcgagaaaaaatgtttttcgataaaatacaagcacttataggggaagtaaatggaaccatatctataggatgttcatctttaattggacaaacaatattgccccgtgtattgagtttgtataatacacaatttcctaatgtagaaatacaagttcaagtgggttcaacagagcaaattagatctaatcatagagattatcaccttttaattaccagagggaataaagtaatgaatttaaaaaatatccatttatttgatgatgaacattattttatttatccaaaagaacgtcatgaagatgtgtcaaagttaccatttattgaatttcaagcagatccaatatatatcaatcaaattaatcattggtatagtgaaaaatttggacaagattatcatgctaccattacagtagatcaagtggcaacatgtaaagaaatgctaataagtggtgtaggagtaactattcttccagaaataatgatgaagaatattgatcatcacgtatttgaatttgaaaaagtcaacattgatggtcttccgttaatccgctcaacgtatatgagttatgatagtagtatattgcaactaccacaagttgatgcttttgtttctttaatgcttaattttactaaataatagttaatcaatattgcaatttaaaagaagaatagaggtataatatatgttttcagcactattgcatattaaaaactataaattatttcttattaatatgatgctcttaggaatgggtattgccattacagtgccatactttgttttattcgcaacaaatgaactaggaatgtcgacaaatcagtttggtgttcttttagctttggctgcagtcagtcaatttactgtaaatgcgattgttgctagattttcagatacacatcatcttaatcggaaaatacttattatttgtgcactatttatgggagcacttagtttttctatatatttttacatccatcatatatggctatttattatagtatatgcgatatttcaaggattattcgcacctgcaatgccccaattatatgcatccgctagagaatctattaatgcgtcttcatccagaaataatgcaaaatttgctaatactgtcttaagatcaatgttctcttttggctttttatttggtccactcattggtgcatatctcattcaatttatgggctacgcagggctatttggcggcacagttatcattttattatttacactgttgttacaaatattcttttataaagatttaaatctgactataaacgaacaagttaaagatactgctagtattgaaataactgcacctaatatgttaaaagataaagctttatttattccatttattgcttttatacttctacatattggtcagtggatgtatacaatgaatatgccattattcgttacagaatatttgaaagaacgagaaggttatgtaggtactttagcaagtttatgtgctggcttagaggtgccttttatggttatattagggattttagcatccaaattatctacacgcactttgcttatactaggagccataagtggtggtctattttattttagtattggtatatttgaaaatatatatatgatgatgataggacaagtatttttagcattttatttagcgattttattaggactgggtattagttatttccaagatatactacctgactttcctggttatgcgtcgactttatttgctaatgcaatggtaataggacaattatgtggaaatttattaggtggcgtaatgagtcattgggttggattagaaaacgttttttatgtttctgccttatctatttttattggtatgattttaatattgttcactaaagatcaaaagtttacatcctcaactatgaatatacaataattaaaagaaatgattatgtatgaaaataaaagtctgggactttaaatccttcgacaaatgaaaaagaccactttttctattgaaataatagaaaaagggtcttttttataattatttaatttatatgtagctcaaagagttgttatgtttttgagaataatgttctaggctcttatttcatatttttataacacagtatttgaatcttcatcaacaaaatgatgttctatatagaaagcaataggtgtaataattatagaaatgataataaatgcccaattattaatttgaatactaggtccatatgctaaaaatgactgtggaataaaaaatacataaaatagtgctactactagtaatgcaataatacagtaattaaaccaccaaatccaatgcgaattattaaaacactgtaattgaacagttttaaaaacgactaaaataaagagaaatataatagttaaaccaatgatgagcgtaataggaaaggtatataaatatacttcattatgattatcaggaacaaaaaaaccgataaaccccttaaagaaaaagaatatacccattaaaaagataaaatttctaaaaatagatttaacaatatttttaaatgtttcatttggtagggatttaagttgttttttagcgtgtgcttttgggtcatgatcgaaaaattcaagagctaaagttccatcattttctgcggcaagtaactccttcaaaatacgattgagcatgagttcactatcatgcggatttacacgtaaatctgatctaatataagtcatatagttttcaaagatttctcgatccgtattatttaaacgcatggatttcacgttgttttcgcgggctaatgttgcagtcgatttcatttattatccccttaaaaataaaaatgtttaaaagttttaaaagttgattattatatattaaatatgaataatcatatcatagttatgtaaagaatataatgtataaatagggagaatataaaatgagaagtctttcaattactgatgatcaattaattgagaatattgcaagtattcatgaatattacttagaaaaaagtggattaaattatcatgctacaacgctctctatagctttaagacaagaaatgattgagagaagattaaacatgaaccaagatattatttatgttattgagtcaaaacatgattttagagaaccttctgctttcatttggggtcattttgaaacgagtacgaaagtggtaacgattgaaatgttatatacacaccctcattgtcgaaacagtgggatagctactaatttaaaattggcattagaacaatgggcgatagaaaaagatgcacattctatcgaaagcacagtggatgcgaataatgaacaaatgattcatatcaatcgtgaacaaagatatgatataactcatgttaaaatgcgaaaagacttaaaataataaaatgaatcatgccacatttcatgttaaaataagtgttattgatatatatttaaaggagaaatatatgaagaagtggattgtacttttactattagcgactttaatattgtcagcatgtggtaaaagtgaagaaaaagtatctttagaaaatgatattaaacagctagaaaaagaaaataaagatttaaaaaatgaaaaaaataatctagagaaacaaaaagaaaagctcaatgcgcaacgagaaaagttacaaaaagaagtagatagttctgttgccaaagaatcagttaaacaagaaactgaaaaatccaaaaaggataactcaagtcaaacgaatttatcaaatgaaagttctagtagtactgaagaacaaagtagtgactcaaatagtgaacaatcaagtaataatacaagctctagttcgtctacagagaacaactaatatcggttttaaaaggctgcaggtttggcgatagaataagaagggtaatagtatttaaatacattttgaatataatatccatatatttgaaaataaagtttaaaaatataataataaaattcagcacataatttatagtattggagagataactatgcatgaacatgattttcaaattctagagggacgtgaccttacacttccagaattaggtaaagagattgaaaatattactggacgtacagtaactcattcaactggagacattaaacgtgttgtagcacacttgccaaattttgaatcagaaagtgatacttttgtagctacttttaaacttaatcatcgtaatgattatatcgatgcaacatttgtagcacctaaaaatcaacgtgataagttaaaagaaattccagtacatatcgaattaataagttatatttcaaaaaattaataattttttaatcaaaatgaacgaaacgaagtgtgttatggttatatactccatgtcacacttttttcataattgtatttgggtaatggagtgtggataaatggttgtttatatagaaacagaaagattgagattgcgtgattgggaagaaaaagatttattatcttttcaaaaaatgaatgcaaatcctcaggtaagacgctattttccaagtctattaagttatagacgttcagaattagatatgcaacgaatggatgatattttaaaagaaaaaggaattgggctgtttgctgttgagcttaaagagacaggagcatggctaggatatatagggttaaactacttaccaaaagatagtaaatatccttttgaaaatttacctatatatgaaattggatggcgacttatccctgaagtatgggggaatggtattgctactgaaggtgctatggctgttttagagtatgcaaaagaaaaaggcatagaagaagtatttagtcttactgctgaggggaatttggcctctcgaaaagtaatggaaaaaattgggatgtcattatttgattattttgaactacctgacctaagtaaatatcatccacttaaaagacatgtaagatatcaaaaaaagttaaacatataaatattaataaataaatactagaagataaatagaaaccctagaggcttttagcatattaaaagttatggactacattaaaaatgtgacgataaaaaacaaatttatttctagtcctagacgcaaatatagaaacacttaacacgaaagtctctatatttgatgccgaaactaggatgggccaacaaattcagaaagaattcgttggcccatcttttttataatattaatcaatcataggttctaacaccaagaggtttataattaagtaatccatcaattagagcctctttagtgtcatataaaggtgctaactctttatattttttatcgataaaaccttcttcaatcatatgatcaatcaaaatttgaagcggattaaagaatccatttaaattaaagatgccgattggtttttgatgtataccaatttgtgcccagctatacatttcgaaaaattcttcaagagaaccagctcctcctggtgccataacaaaagcatctgctaattcagtcattttttctttgcgttcgtgcattgagtctacaagaatgagctcacttactttttgacttgtaatttcacgttcatctaacattttaggcatcactccaattgcacggcctccgtaatctagtacgccatcttgaatagcgcccatgatacctactgaacccgctccaaaaatgagttcataaccttgttcagccatatattttcctaattgatatgcttctttaacataaataggattattccctttacttgctccacaatatactgctatacgtttcattttgtatcctccattaattgattaagtaaggtttgaaaaacatcacaaaaatgctgtcggtctgcttttgaaaaaggggagggtcctttatgacgtccaccttgttttctaatttgtgcattattataacgctgttgaagtaatatatctatattattttcgttatagataaatcctttatgatgcattataattctagctttctttagtaacaaactagctaatccataatcttgagtaatcacaatatcgctagttgttacaagttgtataattttgtaatccactgcatctggtccatcatcaacgtataatatatttacatgacttggataatgagaatgagaaaaatgactaaagctccgtaaaatcgtaacaaaaaagcctgtctcagctgttaaatcaataatttcattaacgactggacaagcatcaccatcaacaaatatggttgtcattatttatttgtagccttttctgaatgtaaaactttatcttgagtgataatactgtcggcattatagttatcatatttcttcatttctttaattcgctgtttttcattatgtttttgaattttttcttcttctttatgacgtttatcaatatttttttgaagctttttctctaatttagaagattgtttatggttctttttagctaattttgatccttttttcttaatatatttagggtcattttctttagcaatttttttgagttcgcgcttattatcgaactcttgttttttatcaccaaagtaatctttaacatcagatgccttatttgctactgtatgtgtagcatgtgaagttgcatgcgaagctttttgaacatctggatgagacttgatttttttacgttctacaactagtggtacgataaatatcggtaacacgttaattactgttttaataacttgttttttgtccatactcgttgcctccataaaattttctttctctttcattaccctatgatacaggaattcaaacgattgcactggattaaaatagtgatttaaaatttttataaaaaaacactaaaattcaaaaagaattttagtgtcatatcattaaattcctttaccaataccgaatccgaaataaagaatagcaatgaaaataactaatacgattcgataaatcgcaaatggtactaacttcactttattaattaaatgtaagaacgttttaatagcgattaaaccgacaataaatgctgctaagaatccaatgatataaaatgggacatgtgcaagatcaatatattgataatttttaagtaatgataatgcacttgctgctaacataattgggactgccataataaacgtgaaatcagaagcagatttatgattgagtttcattaataccccagtagaaattgttgatccagatctactgaaaccaggccacattgcgactgcttgagaaataccaatgacaaatgcttgtaaataattaatttgatcgactgtttgcggatgttttactttagtactgtatttatcagcaataatcatataaatagcgccaatgaataaaccaatcattacagtaggtacactaaataaatgcgcttcaataaagtcatcaaaaagaacacctaaaattccagctggaatcatacctattaatacatgaagtaagttcaatcggcgaggtttagaacgcattccctcactatgagcaacgtgtttgtattttccaatatgtaacatttcgaagtaacgttcacggaacacccatgcagcagcaaaaacagaacctagttgaatgacaattttaaaagtaaaagctgaatgagaacctaaaaattgagacgattttaaccacatatcatctacaagaatcatatgtccagtagatgaaacaggagcaaattcagtaagaccttctacaatacctaaaattaacgccttaataaattcaataattatcataagtaacctctttcttttatgtaaaaaatgaacttttatttatgctaaatattttattttaaaaaattcactttattatcatagcatattgaaataataatttactaataattaccggtgtatatgacaataatgtcatgttgttttgaaataaaatattattttgttgtattgtgtggaagatgatgaattcaaagaaatgacataatattgtcacttaactttgaaatcaattaaatgattatttgtgatcaagcttctataataaagcattaggtgaagaaagttgaaaaatttaatgagtttagtctttaaatataaattatttccaatttttatgggaatgactagtgtattgttagccatatgtgtagtgattcaaaatattggaattgctgagtttttgaatcaagtcttgtaccacaagctttcatctatctattcattgttatttactattttaattgtattaattttgagagtaacgtttaatatgttgaatcaacgattaggggatattttagcttacaaagttaaacatgaccttcgtcaaaaaataataacaagtaagtctaaagcttcaattggcgtacaaacaaacattttaactgaagttatagatggaattacacccttttttaataattacttgccgcaagtgtttaaatctatgttcataccactcgtcattattagtgtaatgtgttttatacatcttaatactgctattattatggcggttactgcaccatttattccattgttttatattatttttggcttgaaaacacgagacgaatctaaagaacaaatgatgtatttaaatcaattcagccaacgctttttaaatatagctaaaggtttgattactttaagactatttagacgaacaacggagacggaaaatcgtatttatagagagagcacacactttagggatttaacgatgaaaattttgaaaagtgcatttctatctggtcttatgcttgagtttataagtatgttaggtattggtttaattgcactagaagcgacgttaagtttagtcgtgtttcaccatatcaattttaaaattgctgtaattgcgattattttagcaccagaattttacaatgcaattaaagatttaggtcaagccttccatactggtaaacaaagtgaaggagcaagtgatattatttttgattttttaaataatattgaagaatcaaatattaacacgcctaccataaatcagaatcagcaaaatcaaatttacttcgataaagtaagttatcaataccctaatacgaccctatatgcattaaaagatataactttttcaatcaatcaaggagaaaacattgcaattgttggtcccagtggtgctggaaaatccacactagcgaatctgattaagcaaatgataacacctacaaaaggtcgtattatatttaattctgaagttacagatataggtatgttaaaccaacatccatatattttttcggcgtctgttaaagataatattacaatgtttaatgaggtttcagatgaaaaaattttacaaactttagaaacagtaggacttaaagaaaagattttaagcttaaataaaggaattcacactgtaattggtgaaggtggggaaatgttatctggaggtcaaatgagaagaatagaactttgtagagtactattactacgtccaagtattctaatatttgacgagcctactacaggtttagatattgaaactgaacgtattgttcaacaaacattagagcataactttaagcatgctactacaattacaatcgcgcatcgtaattcgactatacgtcgtgcaacacgacgtttatatgtaaaagaaggtcatcttattaaagatgataatcaaatttctacgcaattaaataaggtggtgaataaagatgaaaccacatattaaatttcatttagataaagatttatttttagctatattagtcagcattactggaagcctaatagcacttacaatgttcttcctaagtggatatatggtaactcaaagtgcactaggcatgcctatttacgcattgatgatacttgtcgtttctgtaaaattatttggatttttacgtgctattacgcgatatgttgaaagattattatcccatcgaactacatttacaatgttaaggaatataagagtacagtttgtaaagcaactttttccaagagtgcctaatatttatcgtaaatttagatcgagcgatttaatctcaagaatggttaataaggtggagtcactgcaaaatatatatttacgtgtatattatcccccttttgtaataggtttaactgcgctaattgctgctgttgcattaatttattttagtattgctcatgctatattaattgtcataagtatgctattttatttatggattataccatggttaagtgctaagcgtgtacgtatacttaaacaacaagttactactcatgaacaaaaaatgttggctgagttttatgattataaagcgggttatcaagagttaattacttttaatcaacaagatgcatataaaaagaaagtcgttaaatcattagaatattatgataggttacaagctaaagaaaatcgatttttaacattttatgattatatattgaatctcatttctattgtaacgatttttttaagtttagctttagtcgtgatacaaattgaacatggatatttagatgttatatatgtaacgagtatgatattaatgattttaactttgttcgaacaggctattccaatgagtaattttgcttattataaggcagatacagatcaagcattaacggatattaatgaggtgtttaattcttcgataactacacctaagttaaatgtacagacaaaacaagaacctgtatttagtatttctaatctaaactttaaatattttaatcaagaaacattagtattaaacgatattaatttaaccatccataaaggtgaaaaagtagctatcattggaccttctggttcaggaaaaagtacgttaatgcaactgctatgtggtttatatgaaacagaagaaggtagtgttgagttgtatggtcaacctattactcaaattaatgaaaacgatagatataatgaaatcaatgcgttattacaatctcaacaaatatttgatggtactgtcagagaaaatttattatctaatcaaaaagatgaaaacttaatcgatgtcttaaatatgttgaatttaagttacttaaatttgaacactcaattgactttagatggaacttctttatctggcggtgaaattcaacgtttatctttagcacgtttatttttaaaatcgtctaacatttggctattagatgagccaactacagcgcttgatgaagataatacgaacaatgtaatgaaagaaattaacaagcgagcagaaacattagttgttgctacacatgatttagacttacttccatatttcgataccattatcgtaatggttgaaggtgaggttgttgagtacggagattatgtatcattaagtcaaaataaggggtatttaaatcgcatgattcatattaatacattataaaataaaaaacctgagatagctttaaagaatgatctcaggtttttcactattgataaatatataaattacattttgaaatgaataactttaattagtttagtactagcatgtcacattatttgttttcggtaaaagcagtaataattttacctaatagacgattaagttcatggacttcatcgttactcaaagaagaagcaatggcaactttttgagatgcatcacttagttcaggtttaatattttcacttttttcagtaagatgaataaatacttcacgttggtcaatttcagaacgttcccgtttaattaaatcaacgttttccattctttttagtaagggtgatactgtacctgtatctaaagctaattcagtgactactttcttaacatttacaggcgattcttcccataaaatgcttaaaactaagaattgtgggtaggtaagattgtactttttaaagactttgtttgaatagtagcgatttacttgtctttgtgcattgtacaaactaaaacaaagttgctcttttaaattgtgttgttcagacattaaagttctcctccagacatttatccgtttctctttatttcggattaaagttcgtctatgttgtgtaaaatataaattatcacacacttcatttcaatgccatgctaaaattaaagtatgcttaaattttagaagaaaacgatattttaatcaagtgtaatctaacgtacatttttataatattaatttcaaatacattttatatagaaatgagtttttaaaatgataaataataaaaataaaaaaatatctattacaattattaatggctttttaggaagtggtaaaactacatttttgaataattatatacaccaattattaaaaaaagataagaaaataacaattattatgaatgaattcggttcttttgacgttgatagtttacttatcgaagaagatattactgtaaaatcattaatcaatggatgcgtatgttgtgacttaaataatgatttagtattacagttacaatcactgattaaagaaggtgtaagtcaacacattcttattgaatcgactggaattgcacatcctttagaagtctttgcagcgtgtcaagatccaacaatagttaatgacgtggaaattcctaaaataataggccttgttgatgcgttaagatttaataatagaatgaaatatacggcagaaacgaatgagttaatggaagaacaaattaaatatagtgatgtaattattcttaataaaatggatttagtgacacaagtagaattagaaaatataaaaaaacaattggcttctattaataataaagcaacgatttacgtgactacatatagtaaattagatgacgtagtagtgaaaaataaatctactgatattaataggcatgttcatgtccaccatcataatgtacaatctatgaaatatacgtttagcgctcctattgatcgacaattattttaccaatttataatgcgtttgccagatgaagtattcagattaaaaggatttgtaaaatttaaagatcaattggatgcaatatacgaattccaattttcaatgggattacctacttatggaataactgatagagaagtgccattaacgattgttattattggtgaaatgcttgatacaacacgtttgaaaaaccaattagaaatgattcaatttacttaaaatgactccttaatttttatgtgagtggttatgagtattctaaatttctaataaatatgtcacagtcttgtcatgagaataaaaaaataaatcatttataatagaataaggaggatatattaatgaatcataatgaagataaacgtactaaacaaattcgctttgagtttaagtggattacaatcccatatttaatttttgcaattattattctattgttaaatatcttttttacaaatataaaaatcacaatgacactatttggattgttctttgcttataatttaggaatattatttatcgcatttattaataagtacaaacgtacactcatattaacgctaattttaactattttaagtgcagcaactttctttactttattatacgtttttggacttaatcgagaaatatttggttaataaaagtatgaatcacatcatataaatcaagtaaaaggagtcactttagaatttgtattgaattctgtagtcactccttttaattttaagataaatagggtagttaaattattaacaaatcctcaggctaggagtgaaagtatgaatattggcgtcattctcaatagagtatttagaataaataataatccattattcgaatatattaatcaacaaaaagatgacattgataaatgttatcttataattcctaaggaaacatttgaagaggaaggtacagataaaaaagcaaactattattatggcactttagaaaaatttttatatcagttgaaagaacatcatatagagccatatgtcatcaattacagtgaactaggtatgttttgtactgaacatgatattaaagaaatagttatggcgggcgatatcatgagttatcatcaagaaagatatgatattcgacacttaaaacaagcgtttaaaaagcacgatatatccgtaataactattaacgttaatcattattttaagccaagtaacacgatgaatcagcaaggacaaccatataaagtatttacaagtttttataaagcacaccgttcaaaacttagacagcattcttcgtatcaatatcatttaagtgatatcgctaataaatgtagccaatcacaacaaactataactaatgattatcatcatgatggacaatcagaagatcaagcgttaaacaattggcaggattatttaaatcatagtattcaaaactataaaaaggatagagagtatcttccagaagtactcactagtcaattgagtattgctctagcatatggtctgatagatattaaacaaattattacagatttattagaacgatatgaggaaaatgaaaataattacgaaagttttattagagaagtaatgtttcgtgagttttattatgttcttatggctcaatatcctcatagtgcacatgaagcatttaatgaaaaatatcgtactatacaatggtcttataacaaagaagagtttaatcgctggtgtgaaggtaaaactggtttttctattattgatgctgctatgaatgaattaaatgagacaggatttatgcataatcgcatgcggatggtagtctctcaatttttaactaaagatttgtttattgattgggcttggggcgaagattattttagaaaaaaattaatcgattatgatgcagcttcaaatgtacatggttggcaatggtcagcttcaactgggacagatgctgtgccgtattttaggatgtttaatcctactagacaaagtgaacgttttgataaagacgctttatatatcaaaaaatatattcctatattcgataatgtgcccgcaaaattcttacatcacccatttcaacatcaaacacaattagtaaaaaaaggaatacaattaggtgaagattatcctaaaccaattgtagatcataaagttgcgcgcgaatatgtgatgacaatatttaaaaatatataaaaaaagagctaggggaaggaaacagagttcaaattgagttcatgtttcaacccctagcttttttaaatacataactaaacgtcttataaaatttttctacatgaataaactgtattaaatagaaatatatcaatgtgccattcttatccctttaatgaataataaaatgacaaattgaagtagcatcattaatgaaataaatattaaactactaccatttaaggcacgaatgacttctgtgataatagtaaagggacgggtaattaaatgaacagtatgaaatctcaaaaatctacccataaatattcctaaaccatttaaaaacataagtgttattaataaacatcgatttaaccatagctttgaagtgaaatgagataaatgaacaaatatgagagccatgcaataaatcgcgaaaaatacacttaacagtaagaaagtaaagtataaccattctattaaattaagttgaacgtaaaaatcaaatgtaaactgattaagatgaataaggtcagtaaccatataaaatgtattgggtactaataaaataaaaataagagcaaaaataataaatataggccattcaaacttttttctaggtttaaataaatctaataagaaacataattcaagtggaatgtaagctaaaaataaatttaagcttacaaagttaaatacacgtgtttcaaataaagatattacaaaaagaataataaaatagattcttgcaatataacgtgaagtcattaatatgcactactttctaacgatttagttgaattattatagtaaaggttaaaatcgaagtaatcaagaaaaaagaaggtagaataattaaagttagagaagcattaataattgtaaaatggatgtgtaatctgtaagaaaagaatctcaataattttaaatacgtgatgtcatatgtatcattaagataatttgattatacataacataaatgtaaaatactttgaataactattaagtaagtaagatggtatattttaaaataaaaaataatatataatagtatctaaatgaaaaatttagaatttttaacttttctcagaatatgaattagatgaatttcattaagagtatttaattatagataaaagagaggtggtcttatatgaaaaaacaattatttacattatattttaatatatttttaatattcgttggaattggccttgttattcctgttcttccagtatatttgaaagatttaggattaaaaggaagcgatttaggaattttagtagccattttctcattgtcccaaatgattatttctccttttggaggaagtttagctgataaattgggtaaaaaattaattatttgtttaggattagtattttttacgatctctgagttcttatttgctatgagtcattcttttatacttctaatagtatcaagaatacttggaggttttagtgcagggatggtaatgcctggtgtaacaggaatgattgcagatatttctaaagctaaagataaagcaaaaaattttggttatatgtctgcaattattaactctggttttattttaggaccaggaattggtggttttttagcagaagtatcacatcgtcttccattttattttgcaggtgcattaggtgttatggcgtttgttatatctgtaatattgattcgacaaccacaaaatacagtggaaagtcatcatattcactttgaaacaaaagaactttctaagattcaatggggtgtttttattactccaattatcttaacgtttgtacttgcttttggtttgtcttcttttgagacgttattttctctatatacttcagcgaaagcaaactacgcacctggcgatatttcaattgctattgtaggtggcggtgttgcaggagcagtattccaaattttcttttttgataaatttatgagatatatcactgaacttacatttattacttgggcattattatattctgtcattgttatatttagtcttataatcgctcatagttactggtcaattatgttaattagttttattgtctttattggatttgatttaattcgaccagcgctaactaattattattcaaatatagcgggtaatcgacaaggttttgctggaggacttaattctacatttacaagtatgggtaattttgtaggcccattggtagcaggttcattatttgatgttaatattgaatttcctttatatatgtctattattgtaatgttatttgggatagtaattattttcatagagaaaaatttaaagttaaatcgtagcggatgtgattaaataagttttatatattttatataatagaaatgtaacaataaaaagtcgttaggtaatataactgttacaaagattacaattattttaaattgccttctattgaattattttatctatatttgtatgttaagatataaaaaaattcaaagagaagtgtgggtaaggagatgaatttaaaaaatatattgttaagtgtggtagctatcattttatcaatttgtttggcatttctattatttatcgcaacgaatcaaaatgccttagctaaggtacatcgaacaatttctactttttcaaaagttggaagtattgtcgaaactgaaaatatattaaatataaacagcaatcacaccgccgaagcttctgagaaagatcaaacacaacgcaaagcagacattcgtcaaaatcaaaacgttaactataggttaaatgagaaagctcaagaaaaatatttatattcaacagaggaatgtaaaacgatagctgaaaattatatgcaacaaaattataaagagcctgtaaagttagagcgtttgaatgaaactaatcaatccatcacttttgaagcgtatccaaaaaacaaaaaagctgaagatataacaattaataaaatgggtaaagttgagatcatttctgtaaatgatgttaaataaaaatgtaaagtaagattagagtaggaaagtgaaatctaaagatttctatcttactctattttttattagtcaaaaagagtagtaaaatgggatatataaagaagataaatgaggtgttacattgaaacataagaaaactaatgcaatgagaatgcttgatagagccaagattaattattcagtaaatacatttgaaataggtgaagaacatttagatggagaaacaattgcggaattagtgcatgcgaatgtgaaagacgtttataaaacattagtgttagaaaatgctaatcatgatcattttgtatgtgttataccagtcagtgaaacattagacttaaaagaagcggcacatgtcataggtgaaaagaaacttaatttgatgccgatggatgatttaaaaaaagttactggttatataagaggagggtgttctccaataggaatgaaacattcgtttccaacgattattgatgagtcagctttatcacgagacaaaatcaatgtgagtggtggtcaacgaggcatgcaaattatacttgaacctaatgatttaattgcagttacacaggcacaaacagcgcgtattactcaacattaaatgtattagcagagtgagcaatgatatacattgtgaacactctgttaatttttcgattttttgaacgtttttgaacgtttttgataatttttgattgaaatatgtaagcgcgaacactataataaaagttgtaaaggagtgttaaagatgatctctgaaaaacgacaaagtttaattttacaagaacttaagaaaaaagattttttatcactccaagagttaattgaacgaacaggttgtagtgcttcaactataagaagagatttatcaaagttacaacaacttggacgtcttcaacgtgttcatggtggtgcgacacttaatagtcatagaaatcaagaacccattttatctgaaaaactgtctacaaatctaaaagaaaaaaaagaaattggaagaaaggcagctttgctcattgaagataatgattgtatttttatggatgcaggttcttctacaattgagatgattccatttataaaagcacaagatatcgtagtggttacaaacggattgtctcacgttgaaagattacttcagcgaggtattaaaactttgatgattggtggagaagtaaaagctaccacttttgctactgtaggagcaagtgcccttgaagttttaagacgttattgttttgataaagctttcataggtatgaatggcttagatttgaatcatggattaaccacaccggatgaaaaagaagcattaattaaagaaagagcaatacatcaagcaaccacatcttatgttttattagaccattcaaaattagatgaaatatattttgcgcatgtctcaaccaaatcttgccatgttgagtacatcgtatctgagcaattacgtcatcataatcgctacaacgaatacaaagagaaataccatttttaggaggttaattatgatatatacagtgacatttaatccctctattgattacatcatgtttactgatggatttgagctaaaaggacttaatagagctagagaaacatacaaatttgctggaggaaaaggtattaatgtttctcgcgtgttgaaaaccttagatgtttcgtctacggcattaggatttgctggaggttttcctggggaatttatttctagtatcttggaacaaagcgatattaatacggagtttattaaagtaaatgaagatactcgtattaatgttaaattaaaatctggcgatgaaactgaaattaatgcacctggtccgaatgtgacttctgatcagtttgaagcattattaaatcagattagacatacttctaaagaggacactgtcattgtagcaggaagtgttccaaaaagtattccgagtgatgcttatgctcaaattgcaaaaatcactcaagaaacaggtgcaaaattagtagtggatgctgaaagagatttagttaatacagtgttagaatatcatcctttatttattaaaccgaataaagatgaattagaagaaatgtttgatgtcacaattaaatctgatcaagatgtcgttaagtatggtagagaaatagtaaaaaatggatctcaatctgtcattatttctttaggtggagatggtgccatatatgttgatgagacaagaagtattaaagcccaaaatcctaaaggtgaagttgtaaatacagtaggatctggtgacagtacagttgcaggtatggtagcgggtcttgagtcgggactctcacttgaagaagcatttcgccaagcagtagcttcaggtacggctacagcatttaatgatgacttagcattaaaagaagatatagaaaaaatcaagtcacaagttacaatttctgtacttgatggggagtgatagagatgagaataacagaattacttactaaagaaacaattgctatggatttatcagctagtgataaaaatggcgtcattgatgaattagttaatcaattagattcagctggtaaattaagtgatatagctcaatttaaggaagcgattcataatcgtgagtcacaaagcacaacgggaattggtgaaggaatagccattccacatgctaaagtagcagcagtgaaatcacctgcgattgcttttggtaaatcaaaagaaggtgtggactatcaaagtttagatggccaacctgcacatttattctttatgattgcagcgccagagggtggtgcacaaacacatttagatgcattagctaaattgtcaggtattttaatggacgataaagtaagagaaaatttattacaggctaattcagaagaagaaatacttcgtattattgataatgctgatgacgaagcgactaaagaagaagaaaaagaagctcaagagcaagaggctgaagcacaagcaacaactggtgcatcagcgaatgataatgctaacgaatcttacgttttagctgtaacagcgtgtccaacaggtattgcacatacgtatatggcccgtgatgctttgaaaaaacaagcagaaaaaatgggagttaaaataaaagttgaaacaaatggttcaagtggtattaaaaaccatttaactcaacaagatattgaacgtgcaactgggattattgtagctgccgatgttcatgtagaaacagatcgtttcgatggtaaaaatgtagttgaggttccagtagcagacgggattaaacgtcctgaagagttaatcaatacagcacttgatacaagtagaaaaccatttaaagcacatggtggacaaaaaaatacagataaagatagtaatgatgaaaaattaagtccaggtaaagcattttataaacacttaatgaatggtgtttctaatatgttaccacttgttattgctggtggtatcttaatggcgattgtattcttatttggtgccaactcatttgatccaaaaagccctgaacataatgcgtttgcagaacaattgtggaatattggtaataagagtgcctttgcattaattattccaatcttagctggtttcatttctcgtagtattgcagataaaccaggttttgcagctggcctagttggcggtatgttagcaatttctggtggctctggatttatcggtggtattattgctggtttcttagcgggttatttaacacaaggtatcaaatatattactcgtaatttacctcaagcagttgaaggtttaaaaccaacattaatttatccactattaagtgtgacgattactggattattaatgatttatgtatttaatccacctgcagcatggttaaataatctattattaaatggtttaaatagtttatctggttctaacattatgctattaggactagttataggagctatgatggcaattgatatgggaggtccattcaataaagcggcttatgtatttgcgacagcagctttaactgaaggtaatgctgcaccaataacagcagcaatggttggtggtatgattccaccattggcaattgccacagcaatgtttatctttaaacgtaaatttacaaaagagcaacgtggctcaatcgtacctaactatgttatgggtctatcattcattacagaaggtgctataccttttgcagccgctgacccattacgtgtgattccatcaatgatggtcggttcaggtgttgctggagcgattgcattaggacttggttcaagaattaatgcaccacatggtggtatcatcgttatagcagcaacagactttagtcatatcatccaaactatcattgctttaattataggtacacttgtttcagcagtactttatggtttactgaaaccaaaattaacagaacaagaaattaaagcttcagaatctatggatgaataatcaacattggtttaatgagcctgagacataatgagttgtctcaggcattttttatatattaatatttgttaattgaatcgaaaacgtgttgcctcaaagctattttaaggaatactagcatcgagatctttgtaaaaaaggcaatattcaaagaaatttgggttggggcttcagcaaaaagggtttcctgagaaacccaacgttcaacgaaagctggggttggggcctcagcaaaaagggtttcttgagaaacccaacgttcaacgaaagctggggttggggcctcagcaaaaagggtttcttgagaaacccaacgttcaacgaaagctggggttggggcctcagcaaaaagggtttcctgagaaacccaacgttcaacgaaagctggggttggggcctcagcaaaaagggtttcctgagaaacccaacgttcaacgaaagctggggttacattatcgaggggattaacgaattctgtccaatcttttattatatagttaatatgtaattaaaaagatatggcgatatatatacttgactattactatagattagttttaaatgggaatttgagtttaagaaacaaataaccatcttggactattattgcacttttatagtgcttaattaaaaaatcccccatatatcgtttttctgattttcttaaaaatttattacaaggatcattgaagtatatatgaaatagtaggaagaaaatcagtatataatgctttttaaatgattttaaatgttaaaagctttcttatttttatttaaccatttagtatagaaatatggtaaaattaaagtaatacattttttttgggggtgtcttgatgggaaggtcttaacatgcttttataacggtgataagtatgacgtattaaattcgtgttactcattagagacacataatatttggaggtgaatccctagaaatagggaactaattggaaacagtgaccataattaatttagtaatattttttctattaatcgctttaacaactgtattcgttggatctgaatttgcattagtaaaagtacgttcaacacgaattgaacaacttgctgatgaaggtaatggaagcgcaaaaattgttaaaaagatgattgctaatcttgattattatttatcagcttgtcaacttggtattacagttacatctttaggtttaggttggttaggtgaaccgacattcgaaaaactattacatccactttttaatatattacatttgccaagtgcagtaactacaaccatttcatttgtgatttcgtttattgttgtaacttatttacatgtagtgttaggtgagttagcacctaaatcaatagcaatacaacatactgaaaaattagcattaacttatgctagaccattatattattttggtaatgtcatgaaaccattaatatggttaatgaatggttcggcacgagtaattattagaatgcttggtgttaatcctgatgcgcaagcagatgcaatgtctgaggaagaaattaaaattattattaataatagttataatggtggagaaattaatcaaacagaactgaattacatgcaaaatatcttttcatttgacgaaagacatgcgaaagatatcatggttccacgtacacaaatggtaacgttaaacgaaccatttaatgttgacgaattacttgaaacgattaaagaacatcaatttacacgttatccaattactgaagatggggataaagaccatataaaaggttttattaatgtaaaagaatttttaacagaatatgcttcaggtaaaacaattaaaatctctaattatattcatgaattacctatgatttcagaaacaactcgtattagcgatgcattagtttcaatgcaacgtgaacatgttcatattagtcttattattgacgaatatggtggtactgctggtattctaacaatggaagatattcttgaagagattgtcggtgaaatcagagatgaatttgatgatgatgaaataaatgatattgttaaattagaggaagatatgtatcaaattaacggacgtgtcttacttgatgatttacatgaaaaatttgatatcacttttgaagattctgaagatatcgatacaattggtggatggttacaagcacacaatactaatcttcaagttgaagattatatagatacaaaatacgatcgatggattgtttctgaaatggataatcatcaattggtatgggttgtacttaaataccaatttaatgaaacaagacctgtgattagtgatgaagaggaagaagaaaatcacgatcacaaacatgaatcggatgaataaaaataaaggcacttgggtatgtaaacctaagtgtctttatttgtatgcgtaaaagaaattaagttatgctaatttttagttgagaaattatattgaataggatgtggcacaaatgataaatgatacacaagtgttaaataatggttacccaatgcctaaagtaggactaggtgtttataaaatggaagatgatgagatggaaaccgcagtacaaacagcattagaagcgggatatcgtgcatttgatactgcttatttttacggtaatgaacaagcactaggtaaagctttaaacaacagtgatattgcaagagaagacgtatttattacttctaaattatggaatgattatcaaggatatgataatacattagaatattttaataaatctttagaaaacttaggattggattacttagatttatatttaattcattggccatgtgaaaaagatggcttatatattgaatcttataaagcattagaaaaattatataatgaaggtaaaattaaagcgattggtgtatgtaactttaaaccccatcacttagaaactttgatgaaagagacaactattgtacctcaaattaatcaaatagaagttcatccttattttaatcaacaagatgtacaagattattgtgataaacatgatattactgttacagcttggatgccacttatgagaaatcgaggattattagatgatccagtaattacaaaattagcagaacaatatgacaaaacaccagcacaaattgtattacgttggcatctagcccatgacagaattattattcctaaatcaaaaacgccatctcgtattcgtgaaaattatgatatttttgactttaatttagaacttactgagattgcggaaattgatagtttaaatagaaatgcacgtcaaggtaaagatccagatgatgtagcaataggtgatttaaaataatatagtttaaattattacaaaagctggaattaatgttaattatttgttaattacatggttattagtagaatgtttattgattttattgatacaatattggaaagaatgtagaaaaggatgtaattagatgaaaatcagagtcattataccttgcttcaatgaaggtaaagtcgtaaaaaaaacttacgatagattgactgaaattttgacggagaatagtaaaactcgtcgttattattatgacttgttatttattgatgacggtagtaaagataatacgattgagcatatacaacatttagcggaatacgatgaacatgttaaatatatttctttcagtcgaaattttggtaaagaagcagcaatgattgctggttttcaacacagtgtgaattttgatgcagtcgtaatgattgatggagatttacaacatcctccggaatttatacctaaaatggttgaaatgtatcaacaagggtttgatcaagttgtcgctaaacgagatcgtagtggtgaaaatgttgcacgtaaaacaatgtcaaagttgtactataagctcattaatagctttgtcgaagatattaaatttagtgatggtgtaggagattttcgattattaagtcaacgtgcagttaaatcgattgtttcattaaatgaatataatcgattttctaaagggttatttgaatggataggatataatacaaagatttttacttataaaaatgtagaacgagaagctggagaatctaaatggacttttaccaagttattaaattatgggattgatggattaatatcatttaataataaaccactgagagcaatgatatatcttggaatgtttatctttggattaagcatcatttatattatttatttgttaataggcattttaatgaatggaattaatcatccgggttactttacaacaatagcagctgtattgttattaggtggcattcagttaatgtctattggtgtagttggcgaatatattgggcgaatttattacgaagtaaaacaaagaccaaaatatattgtagaagcttccaatttaaaagcacctattgaaaaagtagttgcagaaaaagaaaaaatttatcaataaaaaataaacatgtaaaagctcttacatcatagcttcttacatgtttatttttttaagtcattttcaatatgattatgtttgagttgccacaataaatatatatcaaataaagcataaataattatgaagatataccaaaatgacgttaataaggtcaaaagtataattgaaataataataattgtatgaccaatcataataggatgttgtagcttactcaaaaatttaagatgattcatttcattttttgaaaaagtacttatgaaatcaatgcttaagcctacgataaatatagctggagctaaataagggatagacatatagactgattgatcgctagattcaaaagtgataaataatgagcaactaatcataattgcaaaaatgaatgcaagagatttatactctgaaatcattaagtatatatgtttacgatttaaataatattgtaagattgtccaacttaagaaaaatataattgaagcaaatgttataaaattgaacttttcaatcacaatactattaataatagcattgataacaatggataatagaacggagttaaacgttagttgtttgaaatgatgccgatataaatcaaaacccagaacacatattgtaatggctatattaataaatacatatataatcatggtgtactcctatcacgtgtgtgtagttcattaaaatattatagcaattaaaataaacttaatcatttcaaaacacttaataaataatattctattataatttactaattatacacctttcttattactccataacaatgtatgtaactgaggtaaaacatacacgtgattcatatcactgctattcattactgtgtctacaagggtttcatagcgaccaagtaatttttcggtatgatgttcaacatcatcatctaaataagggtttcctacttgcaaataaaatggaatattaggataacgatgatgaatcattctagcaaattgataatcttctttatcaaaaacaactactttcaagttcaatgttgatggtatacattgttctatgacatcatctaatatttctaaattaggcaccatattagagctaggcggtttaggactaattgttaaatcgttaatttgtcgcatccaaggttgaaatttactgccttgggtttctaatgccgtaaaaatatttttttcttcaaataaatctactaaatcttgaattcctttgattaatgcagggttacctccagaaatagtgacatgatcaaattgattaccgccaatttcttttaaacgatcataaatgtcttgagcagttaataactctatatcatctttagcgctaccatcccacgtaaaggcggaatcgcaccaactacaacgataatcgcatcctgctgtgcggacaaacattgtttttcgtcctataactcgtccttctccttgaatagtaggaccaaaaatttctaaaactggtatttttgaaggcattatttattctcctttggacgatagacaacataacttgatggtgtttcacgtaaatacacttgtacacatttaggtttattgtcatactcgttaagatgagcttgtacgatttcaaaaattgtctgtgccacaatttcagtagaaggacttttatctttaaattgaggtaaatcatttaataaatagtgatcaaattggtcatggaccaatcgttttaattcactaaaattaattaaaaatccattatggtcgagtgtatctccaacaatagttaagttaacaaaataagtatgtccatgtgttctcatgcattttccagcatcttcactaggaataaaatgtgccgcagaaaaattgaaatctttatttaattcaaatgtataagggtgattcactgtaggataaacttgttgtatcataatgacgcatctcctttttgttctaaatattgatgaagtccacgttgtcttaatttacaagctggacattctccgcatccatctccaataataccgttgtagcatgtaagcgtattgtggcgcacataatcgaggacacctaattcatcactgagttcccaagtttgcgttttatctaaccacattaagggtgtatgaataacaaagtctctatccatagataaactaagtgtgacattcatagatttaataaaactatctcggcaatctgggtaaccagagaagtctgtttcacatacacccgtaatgatgtgtttcgcattcacttgataagcaagagctccagcaaatgacaagaataataaattacgagcaggtacaaaagtatttggtataccatcttctcctgtctcaattttcatgtcatgttttgttaatgcatttggagtaagttgagatagtaaagacatgtctaaaatatggtgtttcaacccttgatcttttgctattttagaagctacttcgatttctgtattatgtctttgcccataattgaatgtgacaagttcaacctctttaaaatgtcttttggcgtagaaaagacaggttgtactatcttgaccaccactaaacacaacaattgctttttcagaattcaaaacactgtttggcataacgtttctcctttaaaagttaatatttttaatttatgatgaaatagaatgaaaacattggatataaaatataaaaaaagcctatctctataaaaagatagacttaaaagatgtagaacatatgtacattaaaaagcttatataaatatttctacaaaggtctagttttttatagagggtttcagctaggaacctctttatattcgaattatacgatagatagcttaatatattcatatcttaaaatcaagtgctagtttatagaatattaaaaaaagcgcttatataaaattgtattttaatatattattttgaaggttggaaataattatgattatagtcatagataataatgattcatttacatataacttgattgattacataaaaacaaaaacttctcattgtgtaaaggtaataaaggtaacagaagtgactgtagcattacttgaagaattaacaattgaagctattgtcatatctccaggtccgggaaaaccaagtgactatccaattttgaaaagcgttttagatagatacgcctcatcggtgcctatattaggtatctgtttagggtttcaactcatctatgaatattatggaggggaaattatgcatgggccaaagcccgttcatggtcatacaacacctataatgcatacaggtaaaggacttttcaaacagttacctcaaaattttaatgtcatgcgttatcattctttaattgctaataggcaacaattaccttctcaattaaatattacagctacaaataatgaaggtattatgatggcatttgaacatgatacactacctatttttgcagtacagtatcatcctgaatctatattaagtgaatatggtcatcagcagattcaatactttatagagagagtaggaaaaacacatgaatattacgtttaattaccgttattatactaatgaagatgactacatcaattatcaattgcgatttgatcaatatatttcaaaatcaattgcctattctttagaagaagtaggtgaagttattcaatttgctgaagaacaacagaaaaaggggcattatgtagcgttatatttaacttatgaatcagcgccattttttaataatcaattagaaacgtatcacttaatagaaaaagaagtatacgctgctgcatacgcttttaatcaacccttaaactctgataataataaggataatatacaatatcattcagtacatcattttcaatttcaagaaagtgaagaacaaatgagaagaaaaattattaaaatacaagaagctattacagaaggagatacttatcaagttaattatactactcgtttatccagtaaagtacattatcctatttcaacgttatatacctatttaactcacaacaataacggtggctatacagctttattagataccgaagaagtaaaagttgcgtcaatttctccagagttattttttcaaaaaggtacgtttaacaataaagcaaacattattgttagtaagccgatgaaaggaacaatgccacgtgggaaaaatagtgtagaagatcagttgaattatgaagcattaatgtattctcataaagatagagcagaaaatgtaatgatcgttgatttattacgtaatgatatgtcaagaatttcaaaaactggaaccatcgaggtttataaattgttttttattgaaacgtatcaaaccgtataccaaatgacaagtatggtaacagggcaactagaagatgctatatcgcttcattcaattttaacagcaatgtttccatgtggatctatcactggtgcgcctaaacaaagtacaatggcttatatcaaacatttagaaaccagtccaagacatatttattgcggcacaataggtttattgttaccagatgataaaatgatttttaacattccaattagaacagtagaatatctaaataatctggctctttacggggtaggtgcgggaattactattgattctgttccattaaatgaaattcaagaatttcgagacaaaaccaaaatattggaggagttatgattgaaattatttgaaacaatgcgacttaatcatggtcatataccaaggctaaactatcatacgcgtcgtttacgtcaatcttgttcacaattaggttttcagttttcagagattgcttggtatagttatattgaaaatttaaaacaaaattataatgaccacttatatcgtttgaaaatagaaattgataaagacggacaatttacccacgttattcagccattatcttctaaagacatttttactgcacgttttaaaaagtctaacaatgattatccacaaaaatttattataaataaaacaacagaaagaacatatttaacgcataatcatgaaacagatttgatactactgtatgatgatagtggtaaaattttagaatttgatattggaaatattatgattaaagaaaatggaaactattatacgccacgatataataaagattttttacgaggatgtatgagagaaagtttattagaaaatcataaacttaagctgaaagattatactaaagatgaattaatgataaaactggaaaatgaagaagtagaagtttatttgctgaatagtctacgtgaagttgctcgggtatctatttatatataaaatacatttgataaatattgtgaaatttaatttagttaataatggagaagattatggcattattatggttaatacttatcgtactactcaatagtttaagtaaatatataatcaatcgatatttgaaggataatctaatcatgctaccgcgtattgtaggcacaatgactgtgttgtttcaatttgtactagtatatcttttaattcagtctatcatgccatatgctacgcatttattaaatttattttatcatcaataaaatagattcaaataatttagaatgtaataagaggtgcaataatgaaaatttatagtcaaggagaccaagcgattattatagatattgaacaagaagtcgctgaagatgtaacaaaaaatttaattgctgtacgtacacatttattaaataaagacttacctttcatcactgatattgtacctacagagtctagtatgatgatttgttatgatgctcgagatatgattaaacattataatatttcatcgccatttcaatatatgaaggcacttgtaaattcaattcagactgaattagaacatatcgaaaataaacaaatagcgtgtcattttcataatattcctgtggtttatggtgatcaatttggacctgatttagaggctctattaaaatactatcgtctatccaaagaggaatttattcaacttcattcaaaatcacattactttgtctctatgatgggatattctccaggctttccttatttaacaggaatgaatgaaaaattatatgttaatcataccagtcacaagaaaaaaagagtacctgcaggttctgtcattattgaagggaaaaaatgtggcattgtaacgacagatacttataacgattggttagtcattggctataccccaattaaattattttcaccagagcgcgataactttaatttattaaaattaggagataatgtcttatttcatcctaaaaatccaaatgatactgaattaggagattttaaataatgtcaatcataatagaaaaacctggactttttagcacgttccaagactttggacgccaagggtatgaatatgagggagtcatccctggcggtgcattagatacattaggacatgaaattgcgaatcgtcttgtagcaaatgataaaaacgaagcaactttagaaatgacacatattatggcgaaaattagattcacagagcctactttaattgccttaacaggtcatcactttgaagcgtgtacagaaaatatgaaaattaaaccttataaattgtatttagtagaaaaaggagaagtattgtctttcaaagaaacgagtacaacatctcgtgtttatttagctattggaggaggatttaaattagattcttggttaaattcaacgtcaacagatttaaatgttggtgttggagggtttcatggaagaacacttcaagaaggcgatgaaattgaaatgaaacgtgattatacatcacgacaccgtaaactttttgaaaatttagcacatcagcgaacaacaagttggggaattgatggttatgctttatcgtttaattatgtttctgatgtatttcatgtcattgctaataaaggaacaaatgattttgatactgaaacacaacaaacatttatacatggagagtacaaggtaacgaataagtctaatcgtgtagggatgttattagagggtcctagtattaaagcatattatgaagatatgcctgagtatcaaccagtaaaaaagggcactattcaagtaaaacgtgatggtacacctattattttattaaatgatcattacactattggaagttatccacaaataggtactatagcaagctatcatttaactaaacttgctcaaaaaccacgaggatctcgtttgaaatttcaatttatagatattgaaacggctgaaaaaaatactgtgaagtttagtaattggatgaatcaattatttcacggtatcgaatttcgaatgcaattagaaatgttaaaataaaaaatatcatcaaaatattgaatattaatatttaatgatattttttaatgtaaaggtataggactatagtctgattaaattgaatagattagacgttataatatatcaatcagtttaatagtttagaaatgattaggtatataaatggaaaggctaaacttgagctttttcttgataaataagtaaaaatactttatatttatatattgaactatgaagtattattacaaaaatattacaaaattcgcatttttttaataaatagttaacaattaaatgtagtgataaaaaaggttcttttattaaataataattaaaaattttattgttttaaaaacatattaaattttaaaaatagcattcgtaaatggccgtatttgaataactataaacggaggaaacattcatgagtttacacaaaagaaaaataagtctttttgcgtttttcttaatgactgtatttacagtaacattgaaaacgtatttctcatactatgtagatttttctttaggtgttaaagggttagttcaaaatttaatactattgatgaatccatatagtttaatcgcgcttattttaagtatctttctgttctttaaaggtaagaaagcatattggtttatttttattggaggattcttattaacatttttactctatgctaatgttgtttattttagattcttctcagactttttaacgtttagtacattaaatcaagcgagtaacgttgaatcgatggggggcgcagtaagtgcctcttttaaatggtatgactttgtgtattttatagatactattgtttatctgtttattttaatttttaaacgaagttggttagacaaacgtgtatttagtaaaaagtttgtaccagtagtgatggcagcatcaattgcattgttctttttaaacttagcttttgctgaaactgatcgccctgaattattgactcgtacatttgatcacaaatatttagttaaatatttaggtccatataattttactgtatatgatggtgttaaaacgattcaaaacaatcaacaaaaagcattggcttctgaagatgatttaactcgtgttttaaattatacgaaacaaaaaaatacagaaccaaactctgaatattatggtattgctaagaagaaaaatatcataaaaatacatttggaaagttttcaaacatttttaattaataaaaaagtaaatggtaaggaagttacacctttcttaaacaaattatcgactggtaacgatgactttagatattatccaaacttcttccatcaaacaggacaaggtaaaacttctgactcagaatttacaatggataatagtttatatggtttaccacaaggatctgcgtattcattaaaaggagataacacatatcaatctttaccagcaattttagatcaaaaagaaggttacacttctgatgtgatgcacggggactacaaaacattttggaaccgtgatcaaatttataaacattttggtatagataaattttacgatgcaacatattatgatatgtcggatgaaaatgtcgtgaacttaggcttaaaagataaacctttctttaaagcatcagcagaatatcaatctaaaatgaaacaaccattttactctcatttaattacactaactaatcattatccatttactttaaattcagaagatgcaagtattgataagccgaatacaggcgattctactgtagatggatatattcaaacggctcattacttagatcaagctttagaacagtatattaatgatttgaaagcaaaaggattatatgatgattcagtcattatgatttacggtgaccattatggtatttctgaaaaccataacaatgcaatggagaaattactgggtgagcaaattacaccagctaaattcacagatttaaatcgtactggcttttggttaaaaattcctggtaaaaatggtactgtagatgaaacatatgctgggcaaatggatgtgatgcctactatcttacatttagttggtattgattcgaagaattatttaatgtttggtacagatatgttatctaaagatcataatgatgtaattccattccgtaatggtgatttcatcacaaaagattataaatttgtgaatggtaaagtatattcaaataaaaataatgaattaataacaacgccacctaaagatttagaaaaaaataaaaaacaggtggaaaaagatttagaaatgagtgacgaggtattaaacggcgacctattcagattctacaataatccagattttaaaaaaattaatccatcaaaatatgactacaaaataggtcctcatggaaatcaaaaataattcaatattagagagtgtataaaataaacattctatattaaacgcccgtagataagttttatctacgggttttttatcgttgcattaaaaatcaacaaaaaatgagagtgggacagaattcattttgaattcgtcgttatactgcgacaacacattcctaaattacgttggacgtagactttcttattgaaagttttttgttggggtcccgggactagaattgactgtcaatatattaaaaaagcctaagaccatttaatatgtctcaggcttattcgttaatttaattatcctaatgatacgtctaatatcatcattatcataaaaccaagcattaagcttaatgtagctaaatctgtattattactcgattgagaatcagggataagctcttctacaactacaaaaatcattgctcctgctgcaaaagctaatgcatagggtagtactggagtgataaaaataattgcaatggcacctatagttgcaaaaataggttctactatggctgatgcttgaccataattaaatgctttaaaacgtgttgcaccagcggctctaatcggcatggataaagcagctccttctggaatattctgaataccaataccaattgctaaaccaagggctccaaaaaaggtagcttgtccatttccagttgcaattccaccaaatgctacgccgattgataaaccttcaggaatattgtgtaaagtgatagctaatactagtaaagcatttttacttaaagaagttttaacgccctctcgatattgacttttatcaccgattttttggtgtatatgtggaatgactgcatcaagtcctctaataaacacaccacctagaataaaaccaatcgcagcaggtaaccaagcaggtaaatgaccatttgtaccataatcaatggaaggttgtaataaagaccaaaaacttgcagcaatcataattccagcggcaaaaccttgcatagaagttaggatttttttgtttacagtcttgaaaataaagactgatgcagcacctaaagcggttaataaccaagtgataataccggcaataagcgcttgaagataaggcggtaaattttcgaaaaagtctatcatatctattttctccttatatcatttagcattaaaaaggtgtataatatatagaactgaattaagcttatcagaaatatattgaaatttcgatattaaaaaggaagtaaaaatatggaagcgtataaaatagaacaactaaataaatcatatgcggataaagttatttttgatgacttaaatctctctatttctgaacatgaaaaaattggacttgtaggtataaatggtactggtaaaagtactttattaaaagtcattggtggtttagatgaagatttttcagccgatataactcatcctaatcagtatcgcattcgttattcttcacagaagcaaaatttagatggtgatatgacagtatttcaagctgttctaagttccgatacagatacgttacgtattattaaaacatatgaagaagctgtgactatatatacagaacatcaaaacgatgcgaattttaaaaaaatgatggaagctcaagaacttatggatcaacaccatgcatgggattacaatgctgaaattaaaactattttatcaaaattaggtattaatcatacgactaaaaaaattaaagaattatcaggtggacaacaaaaacgtgttgtcttagctaagacacttatagaacaacctgatttgttattgctagatgagcctacaaaccatctagactttgaatcaattaactggttaattaactatgttaagcaatatccacatacagttttatttgttacacacgatcgctattttttaaatgagattgctacacgtattgtggaattagatagaggaaaacttaaatcttatccaggaaactatgaagattacattgcaatgagagctgaaaatgaagtgattgaacaaaaacaacaagaaaaacaaaaggcactttataaacaagaacttgcatggatgcgtacaggcgcaaaagcaagaacgacaaaacaacaagctcgaattaatcgatttaatgatttggagtcagaagttcaatctcatcatcaaaaagataaaggtcaactcaatcttgcttattctagattaggcaaacaagtatttgagttagaccatttaacgaaaaagattcaaaataaaatattattcaaagatgtaacagaaattattcaaagtggtcaaagaattggtatcgttggaccaaatggtgcagggaagacgacaatgttaaatattttaaatcaagatgatactgattattctggagaattaaaagttgggcaaactgtaaaaatagcctattttaaacaaacagaagaaactttggatagagatatacgtatgattgactatttgagagaagaaagtgaagtggcaaaagaaaaagatggcacttcagtttcagttactcaattgttagagcgatttctatttccgagtgctactcatggtaaaaagatttataaattatcaggtggagagcaaaaacgattatatttattgagattgcttgttcatcaacctaatgtcctgttacttgatgagccaaccaatgatcttgatactgaaacattaacaattttagaagactacattagtaccttcggaggatcggtagttactgtaagtcatgatcgttattttttaaataaagtagcacaagaatattggtatattcacggtggccaattagaacgtattattggaacattcgaagattatgaggcctataaaaaagaaaaagatcgacaggatacacttgaaaaacaagctcaacaacctaaaactaaatcaaacgctcgtaaaaaaacgggactgtcttataaagaaaaacgtgaatatgaagctctaatggaacgtattgaaacgacagaacatagactagagcagattgatgctgaaatggtagaagcgagcactgattacgctaaaataaaagaattaaatgaagaaaaagaacatctagagcaatcatatgatgtagacatcacgagatggagtgaattagaagaaataaaagagcaataaggggaatgtaagtatggaagcaactttgtcacattattttggttatgatacgtttagaccaggtcaaaaagagataatttctaaaatattaaatcatcataatgtattaggtgtcttgcctacaggtggtggtaaatcaatatgttatcaagtacctggtttaatgttaggtggtacaacgatagtaataagcccattgatttctttaatgaaagaccaagtggatcagttaaaagcaatgggtatcgaagcagcctatctaaatagtagtctaaataaaaagcaacaatctgagattgaaaataagttaataactggtgacattcaatttttatatgtggcacctgaacgttttgaaagtaactattttttaaacttgcttagtcaaattgacattcacttaattgcatttgatgaagctcactgtatttcaaaatggggacatgattttagaccgagttatcaaagcgtcataaataaagtgtttacactacctcaagattttacgattgtagctcttacagctacagccacggccgaagttcaacaggatattatggaaaaattaaatatccaaaaagaagatggaattaaaacaagtaccaaaagacgtaatctcatttttaaagtaaattcaacatatcaaagacaaaaatttgttattgaatatgctaaagctcataaagatcaagcaggtattatttattgttctacacgtaaacaagtagaagaattacaagaatctctagaatctataaatattgcttctgctatttatcatgcaggtttaacaaataaagaaagagaagaagctcaaaatgactttgtatacgatcgtattaaagttgttatcgcaacaaatgcatttggaatgggtattgataaatctaatgttcgttatgttattcattacaacatgcctggagatcttgaatcatactatcaagaagcgggtcgtgcaggacgagatggcttaaaaagtgaatgtattttattatttagtgaaagagataaaggattacatgaatattttattactgtttcgcaagcagatgatgattataaagataaaatgggcgagaaactaactaaaatgattcagtatactaaaacgaaaaagtgcttagaagcgacaattgtacattattttgaaccgaatgcgcgtctagaggaatgcggtcaatgtagtaattgcattcaacaaaataaaacttatgacatgaccaatgaagcaaaaatgattattagttgtatcgcacgcatgcgtcaacaagaaaactatcatgttattattcaagtgttacgtggagaattaagtgattatattaaatacaatcattatcatcaacttacaacacatggattgatgaaagactatactacttcagagttaagtcatttaattgatgagttacggtttaaaggctttttaaatgaatataatgaaattctaacgtgtgatgaaagtgtgaaagaattattgaataatgatgtcacagtgtatacgacgccatttaaacataaaagtaaggaaaaagttttcattaatacaatagaaggcgttgatcgtgctttatatagtgaattagtagaagttcgccgtcaattaagtgaaaagttgaatattgcgcctgtgagtattttttctgactatacattggaagagtttgctaaacgtaaaccagaatctaaacaagaaatgattgcgatagatggtgtaggaagctataagttaaaacattattgtcctaaatttcttgaaacaatccaatcatataaaacgaatatctaacaaaaaattaaatatgacttaataaaacaacttagaagctagaaaaatgttttaagttgttttattttttattgttaaaaaataattagtatttaaatctattaagtatgaatttatcaataaacatgatttaatagaaaataagcaatataaattttatagtgatgtgaaggaaatgaaggtgacaagatgatagagtttaaaaatgtaacaaaacgttatggaacgaatgttgcagttgatgatgtgagttttaagattaatgaaggagaattttttattttaatcggaccttcaggttgtggaaaaacaactactttaaaaatgattaatcgattaataccgttaagtgaaggatacatttattttaaagataagccagtgagtgattatccagtttatgagatgcgttgggatattggatatgtactacaacaaatcgcattatttccacatatgacgattaaagaaaatatcgcacaagttcctcaaatgaaaaagtggaaagacaaagatattcatcgacgtgtagatgaattattagatatggttagattagatccaaatacataccgagatcgtaaaccagatgaattatcgggaggacaacgtcaacgtgtaggcgtggtaagagcattagcagctgatcctccagtaatattaatggacgaaccttttagtgcgttagaccccattagtagagaaaaattacaagatgatttattagaattacaaacgaaaattaaaaagacaattatttttgtaacacacgatatacaagaagcaatgaaattaggagatcgtatttgtttattaaatgatggtcgtgttgaacaaattgacacacctgaaggattccaagagcatcctaaaaatcaatttgttcgagagtttatgggcgatcacttacataaagatatcaataattcaaaaatctccgatctaaatcttacaagaacacttactgaatatgacgaaaaacaaggatacccaattataaaagatagtatgaaacttcaagatacttacgagatacttgctaaacatgaagcagtcattgtagaaaataatcatgctttaacacagtcattattaagaagagaagatgtttttgactatctatctaaaaatgataaggagggttaaagcatgaacgaatttttaacaacgctcaatgatcgtagaggagaattactaagaacaatttttgagcacatacaaatttcttttattgctttatttatcgcaattttaattgcagtaccacttggtattgctttaactaaaacaaagcgtttatctgaagttgtaatgaatattgcagcggtattacaaactattccatcccttgctttacttggattaatgattccaatttttggtataggaaaagttccagcaattattgcattagtagtatatgcgctattacctattttaagaaatacatatacaggtattaaagaagtagagccttctctaacagaagcagccaaaggtatcggtatgaaaccaatgcgacgtttaactaaagtcgagttacctattgcaatgccagtcattatggcaggtatacgtacagctatggtgcttattattggtacagctacattagctgcattaattggagcaggtggattaggggatttgatcttattaggcattgatcgtaacaatacagcacttatattgattggcgctattccagctgcattattagctattttatttgattttatattgcgttatatggcgaaattatcttataaaaaacttcttattacactaggtattattctattaattatcttacttgttattgttgttccactctttggtaaaaaaggtgcaacgattactatggcaggaaaattaggttctgaaccttcaattattacgaatatgtataaaatattaattgaagaggaaacacatgatacagttaatgttaaaagtggtatgggtaaaacctcattcttatttaatgcgttaaaatcagacgatatagatgggtacttagaatttacaggtacagtactaggagaacttactaaagaggatctaaaatctaaaaaagaagctgatgtatatcaccaagctaaagcaagtttagagaaaaaatatgatatgacgatgcttaaaccaatgaaatataataatacctatgcgttagctgttaaaagagattttgctaaacaatataatttacaatcaattggtgatttacgtaaagtacaaggtcaacttaaaccaggatttactatggaatttaaagatagagatgatggttataaagcagtagctaaaaaatataacttgaatctttctaatattaaacaaatggaacctaaactacgttatacggcagtagagaaaggtgacattaatcttattgatgcgtattctacagatgctgaattaaaacaatatgatatggtagtacttaaagatgataaacatgttttcccaccttatcaaggtgctccaatgtttaaagaaaagtttctaaaagaacatccggaaattaaaaaagctttaaatcaattatcaaataaaattacggatgaacaaatgcaagaaatgaattataaagtgacagtgaaaaatgaagatccatataaagttgctaaacaatatttagaaaaagaaggattggcacattaaatttgtaaaaagctcatagatacattttatctatgagctttttaacacataaagtataaatcgataatttatggtactattttaattaataagtgaaaaaggaaagtaacttaatttatataggagtgatcataaatgaaaaaacaattacaacaattatcggcatatcaacctgggttatcaccgcaagcacttaaagaaaaatttggtatagaaggtgagttatataaactagcatcgaatgaaaatttatatggaccatcacctcgtgtaaaagaagcaattgaggctcacttagatgaattattttactatccggaaacaggctctccatcattacgaaaagcaattagtaagcatttaaatgttgatgaatctcgaattttatttggcgcaggtttagatgaagtaatactcatgatttctagagcagttttaacaccgggagataaaattgtgacaagtgaagctacttttggacaatattatcataatgcgattgttgaatcagctaaagttgtaaaagtaccgttaaaaaatggcggatttgatttggaaggaattttaaaagaggttaattctgatacctcattagtatggttatgtaatcctaataatcctacaggtacatattttagtcatgatgaattagagtcatttttggaacgtgttccaagtcatgtgccagtcttaattgatgaagcatatttcgaattcgtcactgctgaagattatcctgatacattaaaactacaagaacgctttgataatgcatttttattaagaacattttctaaagcatatggattagcaggtttacgtgtaggatatgttgtggcaacaaatgaagccattgaaaaatggaatatcattcgtccaccatttaatgtgacacgaatttcagaatatgcagcgattgcagcattagaagatcaagattatttaaaagagattactagaaaaaatgcaaaagaacgtgaaaagttctataacattgaacaaagtaaacactttttacctagtcaaacgaactttgtatttgtagtaacagataagccacaagcattgtataatgaattattaaacgttggctgtatcactagaccttttcctaatggagtacgtattacaattggatttgaagaacaaaataataaaatgattgaagtattaaaacaatttaattattaaactaaggaaaaacctttaattgcgattcatgacgaattaaaggttttttgctatactttgaaaatgtgcaaaagataactaaggaagtgatagcatggcacgtaaatctatagcaatagatatggatgaagtattagcagatactttaggtgcaattattgaagcagttaatattgaaactaaattaggaattacaatggaatcgttacatggtcagaaattaaaccatgtgattcctgaacatgatgggttagtaagagatattttaagagcgccagagttttttagacatcttaaagtgataccacatgctcaagaggtggtagaaaaacttaatgagcattatgatgtatatattgctacagcagcaatggatgtacccacctcatttcatgataaatatgaatggttactagaatattttccatttttagatccacagcattttattttttgtggaagaaaaaatattgttaaaacagattatttaatagatgataatcctcgtcagcttcaaatttttgaaggagaacctattatctttacggctgcacataatataaatgaaacacgttttaaacgagtgaatggctggaaagatgtagaagcaatgtttttaaataataattaaagtaaaaaggtatgtatgaagcttgaagcattcatacataccttttgattatgatatagttgttatttctcatcattcgaaaaagtaaggatattgattgctttaggtaacacatcaatggtgataggtgtttctaaattaatttctccatcaatatctactttcatatttggttcagtgcgtaatgttatgtgagaacctggaatatgattaattccttcggtaatttcattccaattcatgctatctctttttttgaaaatatcgtttaaaatactaaaactttgttgttcaaatataaaactatttaactttccatcttgtggagaaagatctgtaagtggaatgcgactgccaccaatattaggtccatttgctatcactagcatagacgtatttcctttatattctttgtcgtctactgtcaatgtatagtcaaaatgttcgggattcatgagtgtttttacagtagaaccaacataacttaattttccaaagatatctttacgtccttcttgaacattttcagcattttgcacaataagtcctagtccgacaaagttaagtacataattatcatttactttcataacatcatatgactcaatatgtgaagacaacaattgctcactagcttttttgaagtcaggatttaagtttaatgttttagtaaaatcattaaatgttcctcctggaataatacctataggaagatctagatcatatttcatcacaccattaatcaattcgttaactgtaccgtctcctcccaatataaaaacgatatcaatatcattactataagtatgatcttttatttctttacaatatctttcaatgtcaccctcattttcacttaattgtattgaaagatgcttacataactgagttagtgatttagcgacttctcccaatccatcatatatatctttaagcccgctatgttcatggtaaaataataccccatgattatactgttgctccatagttaaacctactttcatttaaaattatattataaatatttaccctgaattttataattttaaatatataagtaaaaaaatacttctagatgtcataactagaagtactttttactattttgtatttaattagtgaatacccttcatagcttttgtaatcttaggtgagaaaactaaaatgataagagtaataacaatagcaacggtacctaagaaaataaaataattcgtttgaccaagtggtttaattaattttactaatgtaccattaatcgcttgtgctgaagcatttgttaatagccatacactcatcatttgagcattaaatgctttaggtgcaagtttaacagcagcactattacctgtaggtgataaacaaagttccccaataacacagattacatatgataaaataacccagttaactgagaattgtgtatgtccataacctaaaccaactaatccaattagaatgtatgataaacctgctagtaatgtaccaataccaaatttaatagctaaagaaggttgctttttacccatttttaaccaaatcatagaaataacgggtgcaaataataaaataaataatggattgatagattggaacaaagcttccccaaatcgagttgtccaaccaaataagttgagttgcatgtcagaacgttctaaaccataaatatttaaaacgttagaaccttgttcttgaattgaccagaataacatacctaaaataaataaaggtataaatgctttaactcgagaacgttctacatcggtaacgtctttactacgaagcatagttgtaaagtaaatgattggtaaagctactccaagaactaatacagtattactaattaaatcgaatgaaagggtatgggtataatatgtaactaataatacgataatcacaattgctactatgataccgataatcattccatatttacgcttttcttctttagatagtgggttagtaggtttcattccaacactacctaaattctttctattaaataacaaataccaaacaagacctaatgccataccaatagctgctagaaggaagccaccatggaaattacgtatatctacaaaatgttgcagtataataggtgaaattaatgcacctaagttaacagacatatagaaaataacgaaacctgcatcaatacgtgtatcattttcaggatataaacgacctacaatatttgaaatattaggtttcattaaacctgatccgataataataaagaacattgatgagaataaaccaaataaagcaaatggtaaacttaaacagatatgtccaataataataagtacagcacctaataaagtagcaccacgtgtgcctgtaattctatcagcaatccatgcgccaggaatagaagacatgtaaataagtgctccatatactgacataatcgacattgctgtagtttgatcaatacctaatccattttggtgtattgcgaaatacatataaaatatgagcatcgcacgcataccgtagtaactgaatctttcccaaaactctacgaaaaagagcacacctagtcctctaggatgaccgaaaaatcctttctgtggtattgattgaattgtttgttcatgggagttatttgttgccattaacatcccactcctttctttcctaatatgactgattactatgtaaataagattgtacaattacatctcacaagaatttcttaaaaatataaatttttagaattttcagtcaaataaaatataataacttataaaaataaaagtttttattgctcatgaacttatatctttataaattttagcgataatattaaaatacgctttaatttaataaatcgcaatagtttattaaaaaaatctagaataaaaatgactccttttatattacattagtaaaaataaaaggagttaaaaaacatgttatcgattgtctattttttcaggatacatatcgtgattcattaaacgatgttcggccatcttttcatatttagagtttggacgaccataatttgtatatggatctattgaaatgcctccacgtggcgtgaacttaccccatacttctatataatgaggatccattaagtcaattaagtcattcatgataatattcatacaatcttcgtgaaaatcaccatgatttctaaaactaaataaatataattttagtgattttgattctaccatttttatatttggtatatatgaaatataaattgtagcaaaatcgggttgtccagtgatagggcaaagagaagtgaattctggacaattaaactttacaaaataatctcttccttgatgtttattatcaaaagtttcgagtacttgaggtgtatagtcaaattcatatttattattttgattgcctaataatgtaatatcttgtaattcttctttattgcgaccttgtgtcataattttcctcctaattgttagatgtattagattgtctacgtgctttttcaaacataaagtaactagcgccaataatgatgatataacctataaatgcatagaaatctggtatttctccgaataatataaagccaaataatgcagtaaataatatagaagcatacgtaaaaatagaaatgtcttttgctggagcaaaactatatgctaatgtaataccaatttgtcctactgccgctgataatccagctcctaataaatatataatttgtaactttgtcatcggttcatatgttgcaatagaaaatggaataagaacgatgactgaaaataatgaaaaataaaatacaatagtataaggtgcttcacgtttacttaatgctcgtacacaagtatatgcagatgcagcgaagatacctgagaataaaccggctaaagaagagaacatagttgaagaaaattctggtttaacaatgaataacataccaaaaatagcaattaacatagctataatttgataccttttaatattctcttttaaaaatattaaacttaataaaatagtccaaaaagggttaagcttcattaaagtatcagcatcacttaacaccatgtgatcaatagcgtaaatatttagtaatacccctataagacctaacgtcgatctagtcattaaaaggggttgactactcattttacccaatataggttgcctatattttattatgaaaaataatggaataaacatggctaccaaatttcttgctaaagatttttgaaatacaggtaagtctccggctagtctaaaaaaaacagacataaaactaaaaccaatagcagaaattaaaatagcaatgataccttttaccttaggattcaaagtatatctcctcatttataaaaatttaacgtctatatattagcataatttatttgtggatgcataagtacttgcaaagataaaaaagaaaaactataatgataacgaacatatgttcttaatatggttaaatatactctaaatttttaattcgtaaaatagaaatttattcggcttttaataaaaaaaatgagttatttttttaataaatggttaacaatatattatgatttacattcttatgtattggaaatcccgaataaataaggtttagtaatggtaggcaaaaaatcaagtgaaataccttaaaaaaactaaaataaaattttcttagtttttaatatagctatgatgcacctttaaccgatttcacgaacatttgacatcaaatattaacttttaattagggtaccatttatgtataatgaaacacagaatatagtgttgggttttgaattgagacacaatatgttgtgtttgaggaaaatagaaagattgtatgaataattcattttagtagcaatttcacacttatttggattggttttttcggaatctacactatttacatgaacgatttataaataatgatttttaaagattaataattagaaacacaatatgtagtattaacttgattaagttaacgaaatgatattcgttctaaaagtaagttttcttataagactaagagaacttctttttaattaataagattgtcgaaagagggcgttcctatgaaagtagtttatttctctttttcaggaaatgtacgaagatttataaaacgtagtgaaattaaaaatgtattagaaatcaataaagacaattgtaaggatagtatagaagaaccttatattttagttacaggtacaattggttttggtgaagttcctaaggaagtacagtcttttctagaagttaatcatgcttatatacgtgctgttgctgctagtggtaatcgtaactggggacaaaactttgcgaaagcaggtcgaacaatttctgaaacataccatgtgcctttattaatgaaatttgaggttcaaggtacaaataaagatgttatcgaatttagagataaggtggggcatttcaatgaagattatggacgagaaaaagtacaatcatattgaattaaacaatgaagtaactaaacgtaaagacaatggcttttttaatcttgagaaagatcaagaagctttaaacgtttacttagaagaaattagcgataaaacaatttattttgatagcgaaattgaacgtttacattacttagtagataatcatttttattttaatgtatttaagaagtatagcgaagaagatttaatagaaattatcgaattcgcaaaatctattaattttgaatttgctagttatatgtctgcaagcaaattttataaagattatgctttaaaaacaaatgataaatctaagtacttagaagactataatcaacatgttgccatagttgctctatatttagcagatggtaataaagaacaagctaaacaatttattttagcgatgattgaacaacgttatcaacctgctacacctacatttttaaatgcaggacgcgcacgtcgtggagagcttgtttcatgttttttactagaagttgatgatagtctaaactcaattaatttcatagattctactgctaaacaattaagtaaaattggtggtggcgtggctatcaatttatctaaattacgtgcacgtggtgaagcaattaaaggtattaaaggcgtagctaaaggtgtattacctgtagcaaaagcattagagggtggatttagttatgctgatcaattaggtcaacgtcctggagctggagcagtatatttaaacattttccattatgatgttgaagaattcttagatactaaaaaagtaaatgccgatgaagacttacgtctatcaacaatttccactggtcttattgttccatctaaattctttgatttagctaaagaaggtaaagacttttatatgtttgcacctcatactgtaaaacaagaatatggagtgacattagacgatattgatattgaaaaatattatgatgaacttgtagctaatcctaatgttcttaaaaagaaaaaagatgcacgagaaatgttgaatatgattgctcaaacacaactacaatcaggctatccatatttaatgtttaaagataatgcgaataaagtacatgcgaattcaaatattggtcaaattaaaatgagtaatttatgtactgaaattttccaattacaggaaacatcaattattaatgactatggaattgaagatgaaattaaacgtgatatttcatgtaatttaggttcattgaacatagtgaatgtaatggaaacgggtaaattcagagattcagtacatactggaatggatgcattaacagtagtaagtgacgaagcaaatattcaaaatgcaccaggtgtgaaaaaagcaaataatgagttacattctgtaggtttaggtgtaatgaacttacatggctatttagcgaaaaataaaattggctatgaatctgaagaagccaaagattttgctaatattttctttatgatgatgaactattattcaattgaacgttctatggaaattgctaaagaacgtggagaagcatatcaagattttgataaatcagattatgcaagtggcaaatattttgatttttatacatcacaagagttcgtgccacaatttgaaaaagtaaaagaattatttgctaatatgcacattcctacatcagaagactggaaatcattacaacaacaagtacaagaatatggtttatatcatgcttatcgattagctattgcaccaactcaaagtatttcatatgttcagaatgcaactagttcggtcatgccaatcgtagatcaaattgaacgacgtacgtatggaaatgctgaaacattttatccaatgcctttcttatcacctgaaacaatgtggtactataaatcagcatttaatactgatcaaatgaaacttatagatttaatttcaacaattcaaacacatgtggaccaagggatttcaacaattttatatgttaattctgaaatttcaacacgtgaattgtcacgattatacgtatacgcacatcacaaaggattgaaatctttatactatacacgtaataaattattaagtgttgaagaatgtacaagttgttcaatttaattaatagtgaaataaatatttagaggaaagattaaattattttcatagagaagcattttaatcttatcctcttaaataatgtaatggttaataaatagaggaggattttattaatgaaggccgtcaattggaatactcaagaagatatgacaaatatgttttggcgtcaaaacatttcacaaatgtgggtagaaacagaatttaaagtttcaaaggatatagcaagttggaagacactaacagaggatgaaaaaaatacgtttaaacgtgctttagcaggtttaactggattagatacacatcaagcggatgatggtatgccattaattatgctacatacaacggatttacgtaaaaaagcagtttattcatttatgcaaatgatggaacaaattcatgctaaaagttattcacatatttttacaacgttacttccatctagtgaaacaaattatctattagatacttgggtaattgaagagcctcatttaaaatataaatctgataaaattatctctaattatcataaactttggggaaaagaagcctctatttttgatcaatatatggcaagagtttcaagtgttttcttagaaacgttcttgttctattctggtttctattatccactttatcttgcgggtcaaggaaaaatgacaacctctggtgaaattattagaaaaattttacttgatgaatcaattcatggagtttttaccggtttagatgctcaaagtttacgtaatgagctatcagaaaatgaaaaacaaaaagctgataaagaaatgtataagttgttagaagaactatataaaaatgaggtatcgtatacacatatgttatatgatgatatcggtttaactgaagatgttttaaattatgtacaatataatgggaataaagctttatcaaacttaggatttgaaccttattttgaagaaaaagagtttaatcctattattgaaaatgcattagatacatcaacaaaaaatcatgactttttctcagtaaaaggagacggctatacattagcacttaacgtggaagctttacaagacgaagattttatttttgaagattagaataataactaattttagaaaaactaattgtagaatcatcactgcaattagtttttttaatttctctataaaaaataaaagaatattagtattactattgaaaaatttattatgacaatttaatatatagttaaatgataatcattttcaatggaaatggtatatatactaaggagcattacgaatgaagtttctattcaaaggttatacattattaatcattttagtgatattaagtatactttctttatttattggcgtaagtcaattatcaataactgatctttttcatttgtcagataatcagaaaaatattttattttctagtcgtattcctagaactataagtattcttttatctggaagttctcttgctttagcaggactagttatgcaacagatgatgcaaaataaatttgtaagtcctactacagctggaacaatggaatgggcaaaattaggaatattactttcactcatatttttcccaaaaggtcatatattgatcaaattgacttttgcagttgcattaagcctaggaggaacatttttattcgttaaactaatcaattttataaaagtgaaagaagttatttttgtcccgctcttaggtattatgattggtggcattgtttcaagttttaccacttttatagcattaagaacgaatgcactacaaagtattaataattggttgaatgggaattttgctgttattacaagcggccgttatgaaattttatatttagctattcctttattaattatcgcttatatatttgccaatcactttacgattgctggaatgggcaaagattttagtcataatttaggtgttaaatatgaacaaattataaatattgcgcttttaatcactgcaacattgacagcattagttgtcgtgacagttggaacattaccatttttaggtttaattgttcctaatattatttcaatgtatagaggcgaccacttgaaaaatgcattacctcatacattaatgctaggttctatatttgtattgttttccgatattattggtagattaattgtttacccttatgaaataaatattggtttaacaataggagtatttggaacgattattttcttagttttattgatgaaaggtagaaataattatgcaaattagtgctaataaaaaaatattaattctctttctttttacgatttgcatggctgctttctacttactagtaggtttggattttgaaatttttcaatatcagtttgaaagtcgaataagaaaattagttttaattttacttgttggtggatctattagtacggcagttgttattttccaatctatcactgcgaatagattacttactccttcaattatgggattagactcagtttatttatttattaaagtcttgcctgtgttcttattaggtacacaagccagtgtagtgacaaatacttatttgaattttcttctaactctcatagtgatggttcttttttctttagtattatttcaaggcatgtttaaattaggacatttttcggtttattttattttacttgttggggtagtattaggaacatttttccgtagtatcactggatttattcaacttattatgaatccagatgactttttaaccgttcaaagtgcgatgtttgcaagttttgacgcttctaattctaaacttgttcttatttcaagtatacttttaattattttaattgtaattgcttttatattaagaccttatttagatgtgttattactagggaaagatcagtctattaacttaggtgtatcatatgaaaaaatgacaaaacttttattaattttagtggctttattagtatcaatatctactgctttagtaggtcctgttacatttttaggattattaacagtcaatttagcgcatgaattcatgaaaacatatgaacataaatatattttacccgcaacgattcttataagttggattagtttatttatagctcagtggattatagaaaatatgtttaaagctaccactgaatttagtcttattatagatttagttggaggtatttacttcatatacttacttattaaaaggaggaatgaagattgattcagattagaaatttagataaaaaaattcagagtaaatctattttgaaagatataaatgttgatatacaaaagggtaagttaacctctttgataggtccaaatggagcaggaaaaagtacacttctatcagcagtaagtcgattatttgaatatcagaacggtacaattaatattgaaaataaattaattgatgattataaaagtgatgaattagcaaaaaagttaagtattttaaaacaaacaaatcatactgatatgaatatcactgtagaacagcttgtaaattttgggcgttttccttattcaaaaggtcgaatgaaaaaagaagatcatgagaaagttgcatatgccattgatttactacatctaagggaaatcaaagatagaaatataaaaacactatctggaggacaaagacaacgtgcgtatattgctatgacaattgctcaagatacagaatacattttgttagatgaaccgttaaataatttagatatgaaacattcagttcaaattatgcagatacttcgaacattgtgtcgcgatttaaataaaacgattgttattgtactccacgatattaattttgcatcttgttattcagattacattgttgcactaaagaaaggtgaaattgttaaatctggcccaaaagatagtataattgaaacaaatgtgttaagagatttgtatgaaatggatgttcatgtagaagaaattagaggtcaacgtatttgtttatactatgatgaggttatcttttaaaatgagataaatatttttatatttaaaggggtgatgcttagaaaatataaaagaaaatagttgaaaaattgagtgccaaatttaacttataaaaggagaaatacatatgaagaaaacagtcttatttttagtcttaactttagctttagtattatcagcgtgtagtaataattctggtaataaatcaaataatgaaaatgattcaaaagatacagtttcaattaaaaatagcttttcagcaagtggaaatgacgaaagtagtaatgaggataaaaaaattagtaacactgtgaaagtgcctaaaaatcctaagaacgcggttgttctagattatggagcattagatgttttgaaagaaatgggtgtagctgataaagtgaaaggcttaccaaaaggcgaaaataatgaatctttaccaagttttctaagtgaatttaaaaaggataaatatattaatactggtaatttaaaagaaataaatttcgataaaatagctgaagctaaaccggatgttatttatatttcaagtagagcagccactcagaaaaatctagatgagtttaaaaaagcagcgcctaaagctaaagttgtctatgtaggcgcaagtgaagatcattatattaaagatatgaaaaagaacacagaaaatctaggtaaaatttataacaaagaagataaagcaaaagatatgaatacaaaattagatcaaaaaatttcagatatgaaaaaacaaactaagaatttcgataaatctgtaatgtatcttttagttaatgaaggagaactttctacattcggaccaggcggaagatttggtgatttggtatttaatacactaggctttaaaccagcagataaacacgttaaaataagtccacatggtcaaaacattaataatgaatatatcagtaatcatgatccagatatcattttagcaatggatcgcgggtcagttgtgggtggaaaatcgacagctaaacaagtattaaaaaatgatgttattaaagatgtaacagcagttaaaaataacaatgtttatgaattagatcctaaattatggtattttgcttcaggctcaacaacaacaacagtaaaacagattgatgaattagaaaaagtaattgataaaactaaaaaataaatctaggatattaagtttagaataaataaaagagtgggacatacatcctagaaaaatagccagtaaatgagtttattataaattcatttactggcttctttatttacaatacttcgtatggttggctcgatttgttaggggacaactttagtctgtagtctttagtttgtcctgttccctcaagagtcttgccaaaatactttgtctttatatgttattctatatatcatttaatttaagtattaaatttcaaaatataaatgatagtgaaatttacaacgtgaattaaaatgtgcttggcaatttggacatgtttcagtcatcatgtattcatgaatagagagttcattttgacaaactccacaaagtatcgcctttttatgaaattcctctgctgaccaacgctgaatgttatgagattcatgttcgttatgacattgataacaaggataatacttttcacaacatttaaatttaatcgctataatgtcaagaaatgtatgatagtgaatacaacgtgtttcattgtctacgagagaaccataaacttttagcattgtttaacatctcctaacattgagaatttactctgactctggatattcgccaatgattcgaacttcacgatgtaattcaacatcaaatttttctttcacgactttttgtacgtgatgaattaaattctcataatctgttgctgtaccattatcgacatttaccataaatccggcatgtttagttgagacttccacgccaccaatacgatggccttgaagatttgaatcttgaattaattttccagcaaaatgacctggaggacgttggaatacactaccgcatgaaggatattcaagtggttgtttagattcacgacgttctgtaagatcatccattttagcttgaatctcgttcaagttacctggttctaaagtaaatgctgcttcaagaactactaaatgttgtttttgaacgacactgtttctatagtctaaatgtaattgttctttagtaagttgtatcaaatcgccgtgttcatttacacataaagcataatcgatgcaatctttaatttctcctccataggcgcctgcattcatataaacagcaccaccaacagaaccaggaatgccacaagcaaattctaagccggtaagaacgtgatctcttgccgctcttgatacatctataattgctgcaccgcttcctgctataattgcatcatctgagacattaatatgattaagagataatagactaatcacaatacctctgataccgccttcgcgaataataatatttgaaccattccctaaatatgtaacaggtaattgatgttcatgagcataacgtacgatagtttgtacttgctcattttcagtaggtgaaaggtaaaaatctgcatttccaccagttttcgtgtatgtataacgttttaacggttcattaactttaataatattgtcaggtactaaagattttaaatcttttaagatgtcttcttgttctaacataagtacatcctttcttctcttctataatctaaactttattatagcaactttacatatgttttgctaaaagagtttaaaacaatttgtatatcattaaagtgtatgatacaaattatcaaaaaatttctgtttttggttttcgtagtatcggattgttgagtttagattgataaatttatttttctgattagaaaacatctgtgctacgtgtttttgtgtagacagtacgtgatctatagctaaatattgagtgaataagggcgtatctatttgaataatatgtaatcgtattatttgcttaagattgatcatattatcaaattttgccatcatcactttctttttataagggtggtgtaatcgataaaagcctacataattcaatctcttttcatcaagagatgtaatatcatggagattgttgactccaactaaaacatctaaaatcggttctgtgggataagaaaaatgttttgttcctccgatatgttgtgtaaattttactggagaatctaacaagttaaataacagagctttagtgtcttcgtacaactgatgataatcattgccgttggaacaatttataaatgattgaacagatgcatacatgtgtaactccttcaattaaattattatacaaattctgaaatactataacataatttattttcaatataaataactttatgtataatacgggtgttaggagtgcaaaaatgaaaaaattaataatactttcattatgttcactatactgtttgatactttctggttgtggtcagaataataacgaagatttaaatcgcttcaaacaacacctatctaaagtagagaccaagcaaaaaagcgtggaaaaagtgatgaatcaattagagctgaaccgtttaaatgatataagtaaaaccgatacaacagataaaaataaaaagttatttgaacgactacagaaaaatataaatcaccgtttagtgcctgagtttaaagagtatgaaaaagaagctaaacatcttccggctaagacaaataaaactcgtcaattaaagaaagattatttaaatcatgtgagtaatcaacatcaatctataaatgaaattaaatcatttgtagatttatataatcaatcagttgtggaaaatgaaaaaattctaaattatacacattcatttgaaataaatagagcactagtagaaaaagatatacgtaaaacaaataatcaagaaaatgcacatctattaaaatctaaaattgaaaacaataatcgtaatttacgaaaaactgctcaaaaatatttagaaaaggataattatcctacttcaaaagcaattaatgagcatataaaaccactgatacaaaaacagattaaagatttaaatcagactaatattacagattcacatgtaaacaatgctcgtaaaaatgcgatagaaatgtactataatttacttgattattatgagacacgtgaaacaactattaagattgaagatcaactttcaaaaattaatgttgagaaactacctaaaacgggtaaagatttaagtaagggaaatcacaactttaaaacaaaattagaaaaagtatagcaaaacgaataaaacctaaatttaaatttttggttaacattatatgatgaaatgtgtataattgtagccattgagaagtttaatttaaaaaaagggacaaagttaaaaaatttagaggtgaatagaatggctataaagctgagttcgattgaccagtttgaacaagtattagaagaacataacgatgtatttgtattaaaacatagtgacacatgtccaatttcagctgcagcatttgatcaatttaataagtttttatatgaaagagacatagatggatattatctagtagttcaagaagaaagaaaactttctgattatattgctgaaaagacaaatgtgaaacatgaatcaccacaagctttttattttgtagatggaaaagctgtatggaatgctagtcatagtgatattaatgtatctacattagcacaagctgaagaataagaaagataatatatcgatttaagagtctggtacattttttgttaccagctctttattatatctacatttttatcattttaaatgacttttatatttataaaatgtaaaaaatgaaatatgcgatgaacctatgtataatgtgaaagtgaagttataacgtatgaatttaagaaagatagaaagtggcatgaggtgaaaatagaatgaaaattttagtagccatggatgaatttaacggtattatttcgagttatcaagcgaatcgttatgtggaagaggcaatagcaagtcaaattgatcatgcagatattgtacaggtacctttatttaacggacgtcatgaattattaaattcagtatttctttggcaatcaggtacaaaatataaagtgaatgttcatgatgctgatatgaatgagattaaaacgatatatggacaaactgaagaaggtactataattattgaaagtaatttattttcaaaaggtaataaagcaattgaacaacgtactagttttgggctaggagaagttattttagatgcattaaacaaggacacagatcatattattatatctttaggtggtatggatagttttgatggtggcgtagggatgctgcaagctttaggagctaaattttatgatgatgaaaatagagaacttgacgcacgagaaggcgcacaaatgattaagttcattcgtcatattgacatttctggactgcctagtacattggaaaatgtcagactacaagtgatgacggatttttctagtaagttgtatggaaaaaatagtgaaattatgaaattaagctataaccatcaaattccacacaaaaaagcagtggaaattgataatttaatttggtacttaaatgagattatgaaaaatgaattacatattgctttagggccaattgaacgtggcggagccggtggcggtattgctgcggtgttgaaagcattatacaacacagaaattttaacgagtcatgaactagtaaatcaaattacacatttagatgagttagtatctcaggcagatttaattatctttggagagggtttaaaagaagaagatcatatgcttgaaacaaccacattgactattgcggaacttacagaaaaatatcacaaaccatctattgcaatttgtgcgactaatgataagtttgatatatttaatcatcatcgcgtaacagccatgtttaacacatttattgaaatgccgaaaacatatacagattttaaaatgggtcttcaaattagacattatacagttcaagctttacgattattaaaaactacagctaatggaataaaataaataaaaaagtttagttcaaagaatgaactaaactttttttatttgttatttttcatattgtgttacttcttgagcaataccaataatcacttgtactgctttttccattacatcgatagaagcatattcaaatgggccatggaagtttccacatcctgtaaaaatattaggtgtaggtaaacctttaaatgaaagctgagaaccatcagtaccaccgcgtataggcgcagtatttggttttatctctaaatctgcaaatacttttttaggaatatcaataatatacggatgtggcttaatttgttcagccatattatagtattggtcttcgatatctacttttactggataaccttcataatgaatattaatatcatcacgaatttctaaaagttttttctttttaagttcaaaagattttctatcatgatctcttataatatattgtaaagaagctttttcaactgttccttctattttcattaaatgatagaatccttcataaccttctgtacgttctggtacttcattagcaggtagtagactatggaattgatgtgctaatccaatagcattaaccataacgttttttgcagaaccaggatgaacgtttacaccatgtgtagtgattgttgcttctgctgcattaaaactttcgaattgtaattctccaaactcactgccatccatagtataggcgaaatcggcattaaagcgtttcacattaaatttgtgaggaccacgacctatttcttcatcaggtgtaaaagctatacgtatgcgaccatgtttaatttctggatgggtctgcaagtattttactgcttccataatttctacaacacctgctttatcatcggcacctagtaaagatgtaccatctgtaatcattagagtgtgaccttctaattttttaagttctggaaatacatcttgacttaatactcgatttgtttgacctaatttaataggttgaccatcataatcttctataatctgaggattaacatttgtcgcattaaaatctggtgatgtatctacatgtgctaagaaacctaccgtaggaacttctttttctatgttactttctaaagtagcaaaaagataaccattattatccaattctgtttctaatccaaagttttgcagttctttttgtaataaatgtaataaatcccattgtttctcagtagaaggcgtcgatttcgattcgggatttgattgtgtatctattttcacatatcttgataatctatctataatctgtactttcatgacgaaacatccccttagactctattgttcatattgtaagattttctgtacgtttttcctttgattttaccataaaattgcttaatacgtgtgtaaatataatagagaatttctgctactaatattccaaaagcaattgaaccagaaattaatgtgacctctagaaatgtattcacagcatgagtatagtcattagatactaaaaatcgtgttgcttcatatgctgtaccaccaggaacaagagggattatacctggcacaatgaagataataacgggtcttttatagcgtcgactcatcacatgacttaataaaccaagaattaaactacctaaaaacgcagcgccaacttttcctaaatccatatctacggtatattgataaattgtccaagctaaggcgccgacaaatccacaagcaagtaaaagtcgtttaggagcgttaaatataatagaaaaaagtactgtcgaaataaaacttataacaaaatgaaataaataaaataacatacataaacagcctttcttaaagaattaataaaacaatcgctacgcctgcaccaatagcgaatgatgttagtgcagcttctacaccacgagacattccagcaagtagctcgccagccattaaatctctaatagcgttacaaattaaaattccaggtactaagggcataacactagaaattgttataatattttgatttgtagcaatgcctagtttagtaaatgtaacagcaattgtaatgactactgctgatgctacaaattcagaaaagaatttaatttgaatgaaacgctggacaaagctaaaagttaagaacgcagcaccgccagctaaaatagcaatccagcaatcagaaacaacaccgccaaacatgagtaagaaaaagccacatgcaattgccgcagcaaaaaaattcaataaaaaagaatattgtaatgaagctttacttagatgaatcagttctgatttagcttcatcaatagttaactcatttttagcaatctttctagaaagactatttgtaagagcaattttttctaaatctgtagtacgatctctaattcttataagccttgtatttgttcgatcattaagtgagaaaatgatagcggtcgatgtgacaaagctatatgtatcatttaaaccataactgtgagcaattcgattcatagtgtcttcaacacggtaagtttcagctccagattctaagagaatacgaccagctattaacacaacatcaatcaccttattttcatcgataatagtgattgaattattcataaaagcacctccacaataattaaaatatataatgattttcttgtatatctataatattcttcgcttgtattaatactttattactaaatcagtcattttaaaagtagaataacaaataaataatatagatgttaaatgagtataaaaaagagatgcaacagaattcatttcgaattccacgttccatctcaaattaaatcgtaacgtctataatttaattataggattaaacattacttgattacgaccttcttttttagctacatggaccatatcatcggcgtctttaaatactttacgttgagatttatattcatcttgagataaataaccaacgccaatagatacagataattttataacttccttattaggtaaatggaacgaagatttttcgactgccatcctaatattttcagcaagtttcacactttgatctaaagaataatcgaagataacgatagaaaattcttcaccgccattacggaagattttaaattgatgtggtacataatttttaagcaattgagacatttgttttagtacagcgtctcctgctttatgagtatatgtatcattaacatctttaaatccgtcaatgtcaacgagtaaaagtgcgagactagtatgttctatttcggctttttgagaaatcttatttaaatgtctatcaaattcttttacattacctaaacctgttaaataatcgtacttatcctcgttttcgtaccgtgtaacaagcgaaaagaaatgccagatatcaacaaaggtaatagcagaagtaatcgttagtatgaatgaaataggtataagcataattaattcagttaaatcatataaagttgtgaagatagataaaacaaaaataataacaatactgatagcatttaaaataattaaagcaataatatcattttttttaagaaacggcccaattaaactaacaataatacctattataataagaacgacgccataaaaaaatgaatttccgaataaaaatatatccactagacttatgataagtgaggcaataaaagtgtaaccgacgtttgtatagcgaccaaggaatagtaacggaacgaaagttaggcgaataagatattgatgatgaaaaggaatagggtaagctgttaatagtaatgccaccaaagtcattaaaattgtgacataacctttagaaaatatcatgattttattttctgaatattgtaatcgatggaataaataaattccagctaccataacggcaatattgtaaataattgcttcaatcatattgggatcgactcctttaaattaaccattagtaattgtaagtgaaaacttactatttgtcattaagttgtttgttataaaatatatattatgaatttcagatagactttcatgttcaaatttataacaaaatgatatgatataaaaaatacgtatctttacaaaaaatttacaattaattttaattagtttatgatacatgattaaaagtggtctatttaatgaatagattattacgaagaaaataaatagactaataatatataaaatttaaaaagtatatatactactatagtctaatttaaaaaattaataataattgtttaaatagtatagatgaaaaaataacaggaatatattgaaggtgaactgatgtatactttattacttattgttgtaacattggtaatcagtttaataataacacctattataataaaggtttcttttaaatttaatttagtagatcgacctaactatagaaaagtacatacaaaaccagtatcagtcatgggaggtactgtcatactactttcatttcttattggtttatggttaggtcatcccatagagagagcagtcaaacctttggtaattggtttaattattatgtattttgtaggcatcattgatgatatttatgatttgaagccaattttaaaattaattggacaaattatagcagcatcagttgtcgttttttacgggattaccatagattttatttcttttccaattggtccaaccattcattttggtattttaagtataccgattacaattatatggattgtagcaataacaaatgcaataaatttaatagatggtttagatggtttggcatcaggtgtgtcagttattggtttaactaccattggtttcatagctatattacaaggaaatgtatttatcattatgatttgcagtttgttgattggcgcattacttggcttcttattctttaatttccatcctgcttcaatctttttaggcgatagtggagcattaatgattggatttattattggctttttatccttactaggttttaaaaacatcacatttatttctttattcttcccaattgttattttagcggtaccatttattgataccttatttgcaatgattagaagagtgagaaatggtcaacacattatgcaagcagataaatcacatttacatcataaacttcttgcattaggatatacacatcgtcaaacagtattactgatatactctattgcgattatgtttagtttatcgagtattatattgtatttatctcaaccattaggtgtattactaatgtttatcttaatcgtcatcacaattgaactcatcgttgaatttactggcttaatagatgatagctatcgtcctattcttaatttaatttctaaaaaaaatgacgatgcatctcgccataagacaaaccataaataatacttttattcacttatttacaaaagccagcaatcttaagcgtttgctggcttttgtaatttaattaatttgtttcaatatcaaaaggtaattgcttaggtgtatctttttctaaatcatattgacttgctgtattacggtttaaaaattcgataaatgagtcgtattctgtttctacaacatcaatcttataactcactttatcagtgtaaactttgtctcttagaaaaaaagaggttgaagcaagttcatactcaaatttacctgttaagtcataattaatggtaacagtagtgggaatagcatttcttaattctacacggccgatatcgtaaatcacatctcgtactgcaccactatatgcacgaattaatccgccaccgccaagtttaatgccaccaaaataccgagtaactactacacaagcattgtgaatatccagtttttttaatatttcaagcataggaatacctgctgttcctgttggttctccatcatcgttggctttttgtatattcatttgattgccaacagtatacgcagaacaattatgtgttgcttctttatgagtttgttttacttcttctataaacatcttagcctcttcttctgagaaaacaggtttgatatgagcaataaatcgagatttattaattgtattttcaataatatgttctttttttatagtaataacatgatcactcaattgataaatacctccacgatatgattaatatgaattttattatacacgtttgttttcttttagataaataattgattatgaatttccttttttattaaaataatttataatactgttgagtataattgaggaggacgattatgaaaattgcagtaatgacagactctactgcgaatctgccaaaacatattattgaaaaatatcagataccagttgcaccactgagtgtaacatttgatgatggagaaacatttactgaacatccagatctttcaaaagaatctttttataaaaaaatggccgcatctaaaacaattcctacaacaagtcaaccagctattggtgaatggataaagaactatgaggaattaagagataaaggttatacagatgttatcgtctttaatttatcaagtgggattagtggtagttatcaatcagcaacacaagcaggtgaaatggtagatggcattcaagtccacacatttgatacaagattagcttctatgattgaaggcagctatgtgatttatacattaaaattgattgaagacggagcaacccctaacgaaattattgaggaattaacgtctattcgtaaagatacaggtgcatacttatttgttgatgatttaaaaaatttacaaaaaagtggtcgtattactggtgcccaagcatggattggaacacttttacaaatgaagccagtgcttaagtttgaagaagatggaaaaattcatcctttagaaaaagtacgtacacgtaagcgagcttataattctatagaacaacatgcacttgatattgcgaaaaatattaatgatgtaacagtgtttgtgattaatggcgataaaataaaagagggtaaagatttttgtgctaaattaaaagagaaatattcaaacattaatattcaatattgtgaatatggaccagtcattgcatctcatttaggttcaggtggaatcggagttggatatttcccaagaaaaattgtaatcgaataagatgaaggtctaatcgttaaaagtgagaacatggagggttaaggtacccatctccttttcgattagactttttttattttaataaggaagtgatgaaatattaaatattatggaagattagtatcttcagaaatagaattaaaagatgaaataatcagtgagaaaacgttaggtatcgtaaagagttcaaaaggatatcggtgtattcaatgtggtaatgaagatagtgctcatttctatcaatatttttcctctattcttaataaagaagtaatatattgtcgacaatgtatacatttaggaagaatggataatattactgaatataaaatcattaaaagtaaaaatgttaaatcagagggattatatacattatcttttaaattatctgaacagcaatgttatgcatctgaaaaaatcttatctgctatagaaaactgtgaagacttactattatatgcggtaactggtgcaggaaaaacagagatgatatatgagggtattagcttatcacgtaaaagaggatttaatgtagcaatcatctctccaagagtagatgtagtagtagagattagccagcgtattaaagaagtttttttgaaagaaaatattgacgtattgcatcaatcaagtaaacaacaatataacggacattttgtaatttgtactatccatcaactatatcgatttaaaaatcactttgaagttatttttgtcgatgaaattgatgcatttccgctgcctatggatcatcatctacaaaatgctattaaacaagcggctaaaccgctatatacattgatttatatgactgcaacgccacctagacatttactgcgtcaaataccaaaacatcgcattatacagttacctgctcgctttcatagacacccattaccagttccaaaatttaaatattttaaattaaatatgaatcgtactcaaagttttttaaagtatatgttattaaatcagattgaacataaaagatttacgttagtattttttaataatatagaaaagatgattaagatatccgaatactataaaaaaatattttcagatttgatatgtatttcaagtgaagatgctttacgttttgaaaaagtgaaagcacttcgtgaaggaaaacatcgaattgtttttacaacaacaattttagaacgtggatttactatggctcaattagacgttatcgtaattaatgcagatacatttgaaaaggctgcattagtacaaattgctggaagagttggacgtaaacaagaagctcccacaggaatggtattatttcttcatgaaggtgtgagtatatcaatgttgatggctaaaaaagatattacaagaatgaataaattagggattcaaagagggtggatcgatgaataaatgtattcagtgtgctacttctattcacgaagagttatctatatttaatttttataaaccaccacaacaattttgtgaaacatgcaaaaaacaatggcaagccattaagcttgatatcaatgatgaaaaaagatgtacaagatgccttaattataaaataaatacaggtgatgaatgtttagactgtaaatgtctcaatcagcaatttacgctaatgtcacaactgtattgtgattataaatatgatggaataatgaaagaaacgattcatcattacaaatttatgaaagattattatttagctgaggttttagcttcaaagttaacattgcctaaaacgtcatacgattatattgtccctattccatccccttataaaagagatgaacatcgaacgtttaatccagtaaccactgttttggacaaaatgggtataagctatatagaattattaggcacacgttcacgacctaagcaatcaagacttggaaaaaaagaacgatttaaagctgacaatccgttctatcttaaagaaaatatagatattacaaataaaaatattttactgattgatgatatctatactacaggtttgacagttcattatgctggaagtgtattatgtaataaaaaagtcagaaaattcaaagtgtttgcgttttcaagatgacttaaacatgatattataatagtaagaattaccaatattagaggttaaaggagagataactatgattagatttgaaattcatggagataacctcactattacagatgctatccgcaactatattgaggaaaaaattggtaaacttgaacgttattttaataatgtgccaaatgcagttgcacatgtaaaagttaaaacgtatcaaaattcagctactaaaatcgaggtaacaattcctttgaaaaatgttacattgagagctgaagaacgacacgacgatttatacgcaggaattgatttagttacaagcaaattagaacgtcaagttcgtaaatacaaaacgcgtgtgaatcgtaagaatagagataatggagaacaagaaccatttattgctgagcaacaaacagtagtgaatgaggatgtggaagatacttcagaatcatcaaatgagaatgaaatagaaattattcgttctaaacagtttagtttaaaaccaatggattctgaagaagcagtattacaaatggatttattagggcatgatttttacatttttacagatcgtgaaacagatggtacaagtattgtgtatcgacgtaaagatggtaaatatggtctgattgaaacaactgaatagttgaatgtagacgttctttgcgaaagttaagtatgaggagctatgactagaattgaaaatacatgacataagcacgtgttcaattcagtcaatgactacttccttgtttaaaggtacctgagacaagttgatgtcccaggtacttttattatttagaagaaaataataaatattatatgtatcgtacaatgtgaagaataagtatgaagctactatcgactagctacttttacacttattcatggacggtataatcatgctatgctaatgtaatgaggtaattaaaaattaaagggatagtaagttttttaaaatagaaagaaagtataaatataaaagtaattattgtacacaattaagcatatcatttatatgagtatttaagtataaatttgaacttataaatgatattataaattgttgtaggccaaacagtttttttagctaaaggagcgaacataatgggatttttatcaaaaattgttgacggcaataagaaagaagtgaaacgtttaagtaaaaaagctgatgaagtacttgctttagaggaaaaaatagcgattttaactgacgaagaaatcagaaataaaacgaaacaatttcaagaagaagcacaagcaattgaagatgtaaaaaaacaaaatgactatttagataaaattttgccgcaagcatttgcattagtacgtgaaggtgcaaaacgtgtatttaacatgtcaccttataaagttcaggttatgggtggtattgctattcataaaggtgatattgcagaaatgagaactggtgaaggtaaaacattaactgcgacaatgccaacgtatttaaatgctttagcaggtcgaggtgttcatgttattacagtcaatgaatacttatctagtgttcaaagtgaagaaatggctgaattatatgagtttttaggtttaacagttggtttaaatctaaatagtaaatctacagaagaaaaacgagaagcatacgcaaaagacattacttatagtacaaataatgaattaggcttcgattacttaagagataatatggtgaattatgcggaagaacgtgtaatgagaccattacattttgcgattattgatgaggttgactctattttaatagatgaagcaagaacaccgttaattatttcaggtgaagctgaaaagtcaacgtctctttatactcaagcgaatgtttttgctaagatgttaaaagcagatgaagattataaatatgatgaaaaaacaaaagctgttcatttaacagaacaaggtgcagataaagcagaacgaatgtttaaaatcgataatttatatgatgttcaaaatgtagatattattagtcatattaatactgctttaagagcacatgttactttacaacgcgatgtcgattatatggtcgtagatggagaagtattaattgtagatcaattcactggtcgtacaatgccgggacgtcgtttttctgaaggattgcatcaagctattgaagctaaagaaggcgtgaaaattcaaaatgaatctaaaacaatggcttcaattactttccaaaactacttccgtatgtataataaattagctggaatgactggtactgctaaaactgaagaagaagagttccgtaatatctataatatgacagtaactcaaattccaacgaacaaacctgttcaacgtcaagataagtctgatttaatttatattagtcaaaaaggaaaatttgatgcagttgtagacgatgtagttgaaaaacataaacaaggacaaccagttttattaggtactgttgcagtagaaacaagtgaatacatttcaaatttattgaaaaaacgcggtatacgtcatgatgtattaaatgcgaagaatcatgaaagagaagctgaaattgtagcaaatgcaggacaaaaaggtgcagttactattgctactaatatggctggacgtggaacagacattaaattaggtgaaggcgtagaagaaataggtggccttgccgtaataggtactgaacgacatgaatctcgtcgtattgatgatcaattacgtggtcgttcaggtcgtcaaggagataaaggggatagtcgtttctacttatcattacaagatgaattaatggttcgttttggttctgaaagacttcaaaaaatgatgaatcgtttaggtatggatgattcaacgccaatagaatctaaaatggtttcacgtgcagttgagtcagctcaaaaacgtgttgaaggaaataactttgatgcacgtaaacgaattctcgaatatgatgaagtattacgtaaacaacgtgaaattatttataatgaacgtaatagcattatagattcagaagatagttcagaaattgttatggcgatgatgcgtactactttacagagagctattaactactatattaacgatgaagatgataatcctgattatggaccatttatagattatgttaatgatgtgtttattcaagaaggagaattaactgaagaagaaattaaaggtaaagattctgaagatatttttgaagtggtatgggctaaaattgaaaaaggttatgaaatccaaaaagaaaaaattggagatcaaatgcctgaatttgaacgtatgattttattacgttctattgatactcattggactgaccatattgatacaatggatcagttacgccaaggtatacacttacgttcatatgcacaacaaaatccacttcgtgattaccaaaatgaaggacacgagttatttgacttaatgatgcaagctattgaagaagatacgtctaaatatatattaaaatctgttattcaagtagacgaacaagttgaacgtgaaaaaacaacagattttggtaaggcacaacacgtatctgctgaagatggcaaagaaaaagcaaaaaaacagcctattgtaaaaggtgaaaaaattggacgtaatgatccttgtccttgtggtagtggtaaaaaatataaaaattgccatggtaaagaagattaatatcaagtaattataattaggcgagatcgagacgtatattgcttatcatttaaaagcttttgtcacgatctcgtattttatttaaagaatttataaataaaggagacatatatagtggaattatcagaaatcaaacgtaatattgatgaatataataatgatttagaacaaattagggggtctctttgacttagaaaataaagaaacaaatattcaagaatatgaagaaatgatgacagaaccggacttttgggataaccaaaataaagctcaagatgttattgataaaaataatgcattaaaatcgatagttaatggttactatgaactcaaccataaattagaagatatggatgcaacatgggaattacttcaagaggaatatgatgatgaaatcaaagaagatttagaacaagatattgtaacattcagagaacaaatcgatcagtttgaattacaattattattagatggcccacatgatgcaaataatgctattttagagttgcatcctggtgctggagggaccgaatctcaagactgggctagcatgttattaagaatgtaccaaagatatggtgaacaacaaggttttaaagtagaaaccatcgattatttaccaggtgatgaagcgggagtaaaaagcgtcacattattgattaaaggtcataatgcctacggttacttaaaagcagaaaaaggagtacatcgacttgtaagaatttcaccttttgattcatctggaagacgccatacgtcatttgcttcttgtgatgttataccagaatttgataatgatgaaatagaaatagaaattaatcctgatgacattacagtagatacatttagagcatcaggtgcaggtggacaacatatcaataaaacagagtctgcaatccgtattactcaccatccaactggaattgtagtgaataaccaaaatgaacgttctcaaatcaagaaccgtgaagctgcaatgaaaatgttgaaatctaaattatatcaattgaagttagaagagcaagaacgtgaaatggcagaaattcgtggtgaacaaaaagaaataggatggggtagtcaaattcgttcgtatgtattccatccatattctatggtaaaagatcatcgtacaaatgaagaaactgctaaggtagatgcagtaatggatggagatattgcgccatttatagaagcttatttacgacaaacgatgtcacaaaatgattgattgagttgtttattaataaaaaataaaattttaaaatctaaataaatctaactttaaaatgtaattcgtgacttgtaatattactaatttaatcaatttaaactaatttaggagtgttatttaacctttatattacaaggttttaacattcctcttttttaatgttgtttatgctaaagtattaatgaacaagaatacactacagcaaaggaatgacaacatgttaaaaaaatcaataactgtaacatttgcttcaattgcagcaattacaggtttaaatacgttagcacatgcacaacaaacacacattgttaaagaaaaaacaaatgtagaagcagtggcacaacaattttctacaactgcagatgagataaaaaaattaaatcatataggtaatgatgaagttgaaaaagatgtttcaatagttgtacctgataaagatattgttgaagttaaatctggtgatacattaaacaaaattgcgaaagctcatcatttaacattagatgaattatatgcatttaatccaggagtaaaaccgttaattcatcctggtgatttaatcgcagtaagtgacaaaggttcagcaacattagaaagtcacttgataagtgatagtagtgtatatgctacgccttattcaagtgaaactgtaccattaagttataatagcgctgaaactgcgccgtatgtagcgtctccatcatatgttactagtagtaatgacaatacagaaacagtcagtgcaccagtatattataataatagcgctttaaataaccaaggtaatcattattattttggtaactgtacatattatgcatttgatcgtagacaacaattaggacgttcagtagggagctattggggaaatgcaaataattgggcaagctcagctagaaatgctggtttagtggtcgatcatcgtcctgaagtaggagcggttttccaaacatcagcgggttactatggtcacgtaggtatcgtagaacgtgtgaataatgatggttcgttttacgtttcagaaatgaattggaatggtcatttcaatgatgttacaaatagaacaatttataattcgtctagttataattttatacattaaatttttcaaaggatttataatgttaaaacatcaacaaagcttatgttttgttgatgttttttagttattaataatgcaatgtattatttaaaagaagaaataaaagttacgaaattatcacaattaaaaatttttactaaacgattgattgatataataaatacaagtataatttctatttaataatataaggaggtataaccgcattatgggggttcatcaatactttaaacgtttatctgatcttgaaaaattaataagattgccaggaaaattcaaatattttgagcataatgttgcagcacattcatttaaagtgactaaaatagctcaatacttagcaacagttgaagaatatcatggtaattcaattgattggaaaagtttgtatgaaaaagcccttaaccatgattttgcagaagtatttacaggggatattaagacaccagttaaatatgcaagcagagaattaaaaatgttattttcccaagtcgaagaagaaatggtagatacgttcattaatgaagaaattccgaagccataccaagatatttatcgtaaaagacttcaagagggaaaagatgattctttagaaggccaaattttatcagtagctgataaaattgatttattatatgaaacgtttggtgaaattcaaaagcgtaatccggaagatctgttttttgaaatctatgaacatagcctagaaacaataatgcagtttgatcatttaagttcagtacaagattttatcgatcacgttataccggaaatgcttacggaaaactttattcctcgtgctgaactacgtgaaacaacaatgtcaatcttagaacgacgaagacgaaatgagtgaatataatgatatggtatactttagctgccttctttccttgtatcttagttattttattcagtgtaattaccagaagtaaatgggtaggcgtcattgtaacattgatattaattgccgcttcagtgtataaaggattttttcataatgaatggattatatttttagatgtagtatctatcctagctggttatgtgattattgataatttagaatttcacaaacatcaagactaagctaaaaaaattgcagtacgataccatttgttttatattattaatacatatctaataaaaatacgtcaacatattaagatgaggcataaatatagaagtgaatttatatttgtgtctcatcttttatatatgtataaaaagtgatggcaaacgtaagcgaacaaacgtttgtttttttattcgcttttttgttaagataagtataaataattttatttttactgaaataaacatttaataaaataaactgaggaggcgcttgaaagaatggtagaacatcatccttttaaattaaattctgaatttgaaccacaaggagaccagcctcaagccataaaaaaaattgttgaaggtgttaaagctggtaaacgtcatcaaacattacttggtgcaacgggtactggtaaaacatttaccatgagtaatgtaattaaagaagttggaaaacctacattaattatagcgcataataaaacgttagcaggtcaattgtatagtgaatttaaagagttctttcctgaaaatagggtagaatatttcgtaagttactacgactattatcaacctgaagcatatgtgccatcaacggatacatttatcgaaaaagacgcctcaattaacgatgaaatcgatcagttacgacattcagctacaagtgctttattcgaacgtgatgatgtgattattattgcaagtgtaagttgtatttatggtttaggtaatccagaagaatacaaagatttagttgttagcgttcgagtagggatggaaatggatagaagtgagcttcttcgaaaattagtcgatgttcaatattcaagaaacgacatcgattttcaacgtggtacatttagagtaagaggagatgttgtagaaatctttcctgcttcaagggaagaaatgtgtatccgagtagaattttttggcgatgaagttgatagaatcagagaagtaaattatctaactggtgaagtgatacgtgaaagagaacattttgctatattcccggcttcccatttcgttactagagaagaaaaaatgaaagtcgctattgaacgtattgaaaaagaacttgaagagcgattaaaagaattgaaagctgaaaataaattattagaagcacaacgtctagaacaacgtacaaattatgacttagaaatgatgagagagatgggcttttgttcaggaatagagaattattctgttcatttaacattaagaccacttggttccacaccttatacgttacttgattattttggtgatgattggcttgtaatgatagatgagtcgcacgtgacgttaccacaaattagaggtatgttcaatggagaccaagcacgtaaaaaagtactcgtagatcatggtttccgtttaccaagtgctatggataaccgtccacttaaatttgaagaatttgaacaaaaaactaaacagctcgtttatgtttctgcaacacctggtccatatgaaattgaacatactgataaaatggtagaacaaattattcgaccaactggtttattagatcctaaaattgatgttcgacctacgaagaatcaaattgatgatttactcagtgaaattcaagaaagaattgataggaatgaacgtgtgcttgttacaaccttaactaaaaaaatgagtgaagatttgacaacatatatgaaagaggcaggaattaaagtgaattatcttcattctgaaatcaaaacacttgaacgtatagaaatcatacgtgatttaagaatgggcacgtatgatgctgtagtaggtatcaatttgcttagagagggtattgatatacctgaagtgtcgttagtagttattttagatgcagataaagaaggatttttacgttcaaatcgttcacttattcaaactatcggacgtgctgcacgtaacgataaaggagaagttatcatgtatgccgataagataacagactctatgcagtacgcaattgatgaaacacagcgtcgtcgagaaatacaaatggcacataacgaaaaatatggtattactcctaaaacaatcaataaaaaaatacatgacgtcattagtgctacagtggataatgatgacacaaatgaaaaacaacaaactgaagtacctaagaaaatgacaaagaaagagcgtcagaaaacaattgaaaatattgaaaaagaaatgaaaaaagcagctaaagatttagactttgaaagagcaacagaattgagagatatgttatttgaactaaaagcagaagggtgattattaaatgaaaggtccaagtatcatagttaaaggtgcaagagcacataacttaaaagatatcgatattgagttaccaaagaacaaacttatagtgatgactggtctctctgggtcgggaaaatcatcacttgcatttgacacaatatatgctgaaggacaacgtcgctatgtagaatcgttaagtgcctacgcacgacaatttttaggacaaatggataagccggatgttgataccattgaaggactatcacctgcaatttcaattgaccaaaaaacgacaagtaaaaacccacgttctacagtagctactgtgactgaaatatatgattacattcgattattatatgcacgtgtggggaaagcattttgtccatatcatggaatcgaaatcgaatcgcaaaccgtgcagcaaatggtagatcgtatattagaattagaagagagaactaaaattcaaattttagctcctttagtttcacatagaaaaggaagccatgaaaaattaattgaagatattggtaaaaagggatatgtcagattacgtgtcgatggtgaagtagtcgatgtaaacgacgttcctgcactagataaaaataaaaatcatactattgaagtagttgtagatcgtttagttgtaaaatcaggaatagaaacaagattagcagattcaatagaaacaagtttagagttaggtgaaggaaaccttattgttgatgtcattggtggagaagatctcaaattctctgaaaatcatgcttgtccaatttgtggattttctataggtgaattagagcctagaatgtttagttttaatagtccattcggtgcttgtccaacatgtgatggattaggtcaaagacttacagtggatctagatttggttgttcctgatactaataaaactttaaatgaaggtgcgattgaaccttgggagcctacaagttccgacttttatccaacattattaaaacgagtatgtgaagtttataaaattaatatggataagccatataaaaaattgactgatagacaaaaaggtattcttatgaatgggtcaggcgataaagaaattgagttttcatttcatagtcgaaatggaggcacacgccgtagaaaaatgaaatttgaaggcgtagtcgctaatatagatcgacgttatcacgaatcaccatcagaatatacacgtgaaatgatgagtagatatatgactgaacttccgtgtgaaacatgtcacggtaaacgtttaagtaaagaagcactttcagtatatattggtggatacaatattggagaagttgtagaatattcaattaaaaatgcactcaaattttatgagaatatagagttatcagagcaagacaaagcgattgctaaacaaattttaattgagattatttcaagattaacatttttaaataatgtaggccttgattatttaacactgaatcgttcttcaggaacattatcaggtggagaagcacaacgtattcgtcttgctactcaaattggatcacgattgacaggcgtgctttatgtattagacgaaccttctatcgggttacatcaacgcgataatgatcgtttaatcaatacattaaaagagatgagagatttaggtaacacactaattgtcgttgaacatgatgatgatacgatgagagcagcagattaccttgttgatgtcggacctggtgcaggtaaccatggcggcgaaattgtctcaagtgggactcctaaaaaggtaatgaaagacaagaaatccttaacaggtcaatacttgagcggtaaaaaacgtattgacgtaccggaacatcgtagagaaatcacgaatcgtaaaatatcaataaaaggtgcaaaaagtaataatttaaaagatgttgatgtagatattccattgtctgtaatgacggttgtaacaggtgtttctggatcaggtaaaagttcattagttaatgaagtgttatataaatcattagctcaaacaattaataattctaaagttaaacctggagagcatgaggaaattaaaggtattgatcaattagataagattatagatattgatcaatcacctataggaagaacaccacgttctaacccggcgacatatacaggtgtatttgatgacattagagatgtttttgctcaaacgaatgaagctaaaattagaggatatcaaaaaggacgctttagttttaatgttaaaggcggtcgttgtgaagcttgtaaaggcgatggcatcattaaaatagaaatgcacttcttaccagatgtatatgttccatgcgaagtgtgtgatggcaaacgatacaatagagaaactttagaagtcacatataaagggaaaaatattgcagatgtattagcaatgacagtagaagaagcgacttatttctttgaaaatattcctaaaattcatagaaaattacaaacacttgtagatgtaggattaggctatattactttaggacaacaagcaaccacactttctggtggggaagcacaacgtgtgaaactggcttcagaattacacaaacgttctacaggacgctcaatttatatcttagatgaacctactacaggtcttcatgttgacgatatcagtcgattattaaaagtattaaatcgccttgtggaaaatggagatacagtggttattattgaacataatttagatgttattaaaacagcagattatattatagatttaggaccagaaggcggcgaaggtggcggtactatcgttgcaactggaacgccagaagacattgcaagtgtggaagcttcttatactggtaagtatttaaaaacagtgttagaacgtgataaagtgcgagatgaataaaatagcatttaatgtgcgatagtgtttttttagagtacaaatgaagtagaatatcattttactgattttgaaaaaaggagtagaaaaatcattttctactccttttttatataacatattgttatatttttgatatgataagagatgaattaattcaagggaattttgaggtgaactcatgttaacgacagatagattggttaaagtattaaaactgaagctatttactggagaaaaaggattaaataaaacgattaaaaacattgatatttctagacctggtttagaaatggcaggttatttttctcattatgcagcaaatcgtattcaattattaggtaccactgaattatcattttacaatttattaccagatgaagaaagacggggacgaatgagaaaattatgtcgtcctgaaacgccagcaattattgtgacaagaggattagagccacctcaggaactgattgaagcggctcaagaaatggatacacctttgattgtttctaaagatgctacaacaagtttaatgagtcgattaacgacatttttagaacatgagttagctaaaacgacctctctacacggtgttttagtagacgtatatggtgtaggagtattaattacaggagactctggcatcgggaaaagtgaaacagcattagaattagtaaagcgaggtcatcgtttagtagcagacgataatgttgaaattcgtgaaattacgaaagacgaattggttggtacaccacctaagttaattgaacatttattagaaatacgtggactaggaattatcaatgtcatgactttatttggagcggggtcaattctaacccaaaaacaaatacggttaaatataaatcttgaaaattgggataagaataaattatatgatcgcgttggattaaatgaagaaacattaaagattttagatacggaaataactaaaaaaacaatccctgtaagaccaggaagaaacgttgctgttattatagaagtagctgcaatgaattatcgtttaaatatcatgggtattaatacagctgaagaatttaatcaacgtttgaatgaagaaattatcaagaatgggaatcagaatgaagggaaatagtatatgctttttaatttgaattatatcaatcctactgctatcgatataggtcctttatcgataaaatggtatggaattattattgcagtaggaatattaataggatattttattgctcaagaaagcttgaaatctataggattacataaagatacattagtagatattatcttttattgtgcaattttcggatttctagttgcaagaatttattttgttatatttcaatggccttattatatggaaaatccatcagaaatacctaaaatttggcatggcgggatagctattcacggtggattaataggtggctttattactggaattattctatgtaaattgaaaaatcttaatccttttcaaattggagacattgttgcaccaagtattatattagctcaaggtatagggcgatggggcaattttatgaatcatgaagctcatggcggaccggtatcaagaacatttctagaaagcatgcatattccagaatttattattcgaaatatgtatattgaaggtgtatactatcatcctacttttttatatgaatctatttgggatatacttggatttattatattaattacccttagaaagcatctacgcgttggagaaacattttcattatatctcatttggtattcaataggacgcttcttcgttgaaggattacgaacagacagtttaatgttaacaagtcatattcgcgtagctcaacttgtttcagttattttaatgattatgggtattattttaattatctatcgtcgaatcaaacatcaaccagttatttataaaaatgctggaccattaacttggaattcaagagtgaaggtaaaataatgagacgattaactattattaatacacagtcgatgaatcccttatggcgcatttaccaatttgttcgtttttctaaagtgttaaaaaatacagtaataatagaaataagtcgctttattccttttttaaatgtaaaacgttatatttatattcatttcttgaagatgtcaattggggaacgaactgcatttgcctataaggtaatgcctgatatttttcatccccagttaatatctattggcagtaatactgttattggttataatacaacaatattaacgcatgaaattttagtaaatgagtatcgttatggacgagtggacattggttctcatactttaattggagcaaatgtgaccattttacctggggtgaaaatcggtcataacgttataattaaagcaggtactatcgtctctaaagatgttcccgatgatactattgcttttggaaaccccatgcaaattcataataaataagaaagtggtgacaaagcatggcacgaaaggaacaaaaaattattccaatgacttttgatgagaatttttatcgaaagatggcagatcaaaaatataaacagagagattatagaaaagcagctgaatattatagaaatgtgctagatttgtcacctgaagattttgatataagacttaagtatgccgattgtttaaatgaattgaatttgaataaaaaagcagaaaaaatgttttatgaaagcattataaatgatcataatgtagcagaaagttattatcaattgagtcaactgaatattaaacttaacgagccaaacaaggccttcttgtttggtattaattatgtagttttatcaaatgatgattcttttaaagaagaattagaaaaaatgttcgaagtttcttatattgaagaaaataaaattgaaatggaagcacaattatttgcagttcaattattatttcaatatttattcgctcaaggacgtttacaagaagcacgaacgtatattttaaaacaaaacgatgatattcagtcgcatcgtgttattagaaatttactagcaatgtgttgtctttatttgagtgaatatgagattgctaaagaattattcgaaacattgcttgctgaagataactcggatgtacatgcactctgtcattatacattgctattatataatactaatgaaacagagaagtatcacaaatatataaaaatattaaataaagtgatgccgatgaacgaagatgaaagttttaagttaggtattgtactaagttatctcaaacagtacaaagcgtctcaacaacttttattacctttatataaaaagggtaagtttgtttcaattcaaatgtttaatgctttaagctataactattattacttaggaaataaaaaacaaagtaaattattttgggataaattattgcaaatttctgaagtagatgttggatatgccccatgggtattagaagaaagtaaatatacatttgaacaaaaaatattacctttattattagatgatgacagtcattatcgattatatggcgtatttttattaaatcagttaaacggaaaagaaatactaatgactgaagacatttggtcagtattggaaaacatgaatgactatgaaaagttatatttaacttacttagttcaaggattacatttaaataagcttgattttattcataaaggcttaaagaaaatgtatgacgttgaagaactatcgtttgatacagaattatttgtcagttggattgataaaggagaagctttaatcgttgaaggcgttaattttaaagagttaaatagatatattgcggcacatgtttatttatattaccgttatcataaaaagcgtataactaaaaagaaaattattgaaatttttaatactacaagatataaattagataacgcaattgataaattattgagcatataaatttatgaaaagcaaataatactatataatgcgcgtattaatataaacgtaggaggtataaaaatgaacgaagtagattttgatgttgcgataattggggctggaccagctggaatgactgctgcagtttatgcatcacgtgcaaatctaaatacagtgatgattgaacgtggtatgcctggaggacaaatggcaaatacggaagaagttgaaaattttccagggtttgaaatgattacaggtccagatttatcaacaaaaatgtttgaacatgcgaaaaaatttggtgcttcttatcaatatggagatatcaaatcaattgaagataatggcgatcacaaagtgattaatctaggaaataaaactataacagctagagcagtgattatttcaacaggtgcagaatataaaaaaattggtgtccctggtgaacaagaattaggtggccgtggcgtaagttattgtgcagtatgtgatggtgcattctttaaaaacaaaaatatatttgttattggtggaggcgattcagcggtagaagagggcgcattccttactaaattcgctgataaagtaacaattgttcaccgaagagacgaattaagagcccaaaaaattctacaagatcgtgcatttaaaaatgaaaaaattaattttatttggagtcacactttgaaatcaattaatgaaaaagatggaaaagttggatctgtaacgttagtttcaacaaaagatgcgtctgaacaaacgttagatgcagacggtgtatttatttatattgggatgaaacctttaacagcaccatttaataacttaggtattacaaatgatatgggttatattattacaaaagatgatatgactacttctgtaccagggatttttgcagctggagacgtgagagataaaggattacgtcaaatcgtaactgctacaggtgatggtagtattgctgcacaaagtgcaattgattatatcgaagaattaaaagataaagaagaagcttaagggattaattaaagctagaataatcacttctgatagaagtattattactagcttttttcttagcagtaaagtcgatacaaattgttagcaaggtaaaaatatatgctatgatgttatataaatacatgtatgcttaaatggatggtgcttagaatggttaatcaaataaatgatgaaatgagcaaaagtgaactattagttgttacaggattgtctggcgctggtaaatcattagttattcaatgtttagaagatattggctttttctgtgtagataatttaccacctatattactacctaaacttgtggagttaatggagcaaggtaacccttcacttcaaaaagtagcaagtgcaattgatttaagaggaaaagagttatttaaatcacttatagatgaaattgatgtaattaaaacgagaaatgatgttattgtagatgttatgtttttagaagctacaactgaaaaattaatttctagatataaagaatcacgtagagcgcaccctttaaatcaaaatggtcaaatgtctttaattgattcaattctagaagaacaacaattactttcaaatattagatcaatagcgaattatattattgatactacagagttaaagcctaaagaattaaaagaaagaatcaaacgtcatttcgccgatgaaaaaatgaattcatttagtattaatgtaactagttttggatttaaacatggtattcagaaagatgctgatttagtattcgatgtacgctttttgcctaatccatattatgttgaagacttgagaccgatgactggagaagatgaagcagtttataattatgtgatgaaatggaaagaaactgaaactttctttgaaaaactaatggatttacttatttttatgattccaggctataaaaaagagggtaaatcacaactggttatagcaataggttgtactggcggacaacatcgctctgtagccttagctaaacgtatcggagaagagttaaatgatatatttgattataatgtgtatgttcatcatagagatgcacatattgaaagtggcgtgaagaaatgaaacagttgaaagtagtactaatcggaggaggcacaggactctcagtactagctagagggttacgagaatatccaatagatattactgctattgttacagttgcagatgatggtggtagtacaggtaaaattagagatgaaatgtctattcctgctccaggagatattagaaatgtcattgcagcgctaagtgatgcagaaccaattctagaagaattatttcagtatcgttttgaagaacatcaaattgaaggtcactcattaggtaatttattacttgcagcacttacaaatataaaaaatgactttggtcatgcagtgaaagaattaagtaaaattttaaacattaaaggaaaagtgattccatctactaatactaatgttatgttaaatgctgttttagaagatggtgagattgttaaaggtgaatctaaaatacctaaaaaaaataaaaaaattcgacgtgtctatttagaaccatctaatgtagaacccatgcaggaagccgttgatgctttacaagaagcggatttaattgttctaggtcctggttcactgtatacaagtgtaatttcaaatttgtgtattgaaggtatttctaaagcaatcataagttcacaagcaccgaaattatacatttctaatattatgactcaaccaggagaaacaaatgattatgatgtctacgatcatgttaaagctattcatcaacatgctggtgaaccatttattgattatgttatttgtagtaatgatgcatttgatgaacagattcttcaacgatataaagaacgtaatgctcatcctgtaagtacgaataaaataaaattaaaagaaaataatattaaaatgattacttctaaaaatcttgtagaaatttatgaccatgtctttgttcgtcataatacaaaggtacttgctaaacttgtatatgatttagcacttgaattaacaagtacaattcaatttaaacctaaaaaataaattttaatgaatttaaaaataatttgatatagagtgttatatattttgagatgttaattacatataataatgatgatgagaaaaggagggagcatcaatgagttttgcatcagatatgaaaaatgaattgacccgcattgaagtcgatgaaagtaatgctaaagctgaacttagcgctttgattcggatgaacggtgcactcagtttatctaatcaacaatttgtaattaatgttcaaactgaaaatgcgactacggctcgaagaatatattcattaattaagcgtatttttaatgtcgaagtagaaattttagtacgaaaaaaaatgaaattaaaaaagaataatatctacatttgtcgaactaaagtacgtgctaaagaaatacttgataaattaggtattttaaaaaatggtattttcgttcatgacattgatgcgagtatgattaaagatgatgaaatgcgtagaagctatttaagaggggcatttttagcgggtggatcagtaaataatccagaaacctcttcctaccatttagaaattttttctcaatatgaaggacatgctgagggattaactaaactaatgaacagttatggactgaatgctaagcatttagaacgaaaaaaaggaagtatttcttatttgaaagaagcggagaaaatttctgagtttttaagtttgataggggggtaccaagcactattaaaatttgaagatgtaagaatagtgagagatatgagaaactctgtcaatagattagtaaattgtgaaacagctaatttaaataaaactgtgagtgcagctatgaaacaagtacaaagcattcaattaattgatgaagaaataggtttagataatttacctgatcgtttaagagagattgcaaaattacgagtagaacatcaagaaatttctttgaaagaattaggagaaatgatatcaaatgggcctatttctaaatcaggagtaaatcatcgcttacgaaaattaaatgaactcgctgataaaattagaaatggagaaaaagtcgaattataaaataaaatgtgttttaagaaataggatgaaacattaatataacgtttcatcctatttcttaataatagccccctcgagaggaatcgaacctctatcttaagaaccggaatcttacgtgttatccattacactacgaggagtataatataaaaactaatttctgtactaaatatataattaacagtacaatttgaatatatgaatagtgtataaaattataaaaagcaacgtcaaataaaagtagaagtattatttttgaccatttttgacttttgttgtaaaataaatataacagttaattacaaggaggaaatataatgaatttaattcctacagttattgaaacaacaaatcgcggtgaacgcgcatatgatatttattctcgtctattaaaagaccgcattattatgttaggctcagcaattgatgataatgttgcaaattcaattgtatcacaattattattcttacaagctcaagattctgaaaaagatatttatttatacatcaattctccaggtggtagtgtaacagcaggatttgctatttacgatacaattcaacacattaaaccagatgtacaaacaatttgtattggtatggctgcgtcaatgggatcattcttattagcagctggtacaaaaggtaaacgttttgccttaccaaacgctgaagttatgattcatcaaccattaggtggcgctcaaggtcaagcgacagaaattgaaattgctgctaaccatatcttaaaaacacgtgaaaaattaaatcgtattttagctgaacgtacaggtcaaagtattgaaagaattcaaaaagatactgatcgtgataacttcttaactgctgatgaagcaaaagaatatggtttaattgatcacgtaatgcaacctgaagatatgtaaatagaattgtttaatatgtaaaaaaggaagagcattgatgctcttccttttttatggttttttagtttttaataaatattgtatagctacaaaccctaataataatcctataataataaagaaaaaagataaaagtaccataatgatactcttttcgaaagcaaagacaccatttaaaattaaaaatatactagcgataagtagtaagatatacgttaacttgttgtcattcatcactaaatctccaattactattcgttaattaagtcttcaagtgcaacttttaaattattatacctaaaattaaaccctaatgcttctaatttattaggtaagactttttgagtatcgagaactactgtcgacatttctcctagtacagcacgcataattaatgatggcacccacgtttcatgtggtttatgcatcgtacgtccaagcgtataaccaaataaattttgacgttcaggaattggagaagccatattaaatggaccttttgcatttgattcgtcaattgtaaataaaatcgcacgcactaagtcatctatgtgaatccaagaataccattgatgtccagaacctaatttaccgcctacgtagaatttatatggtagtttcatcgtttgaagtgcgccaccttcagaagacaaaatcatactaaatcttcctaatacaacacgtgtaccaaaattttcgaaacgacgagcaaatcgttcccattgataaacgacatctgacaggaaatcaaaaggaagtgtttgatattgttctgtataagttcgatataaacttggaggataataacccatagcgcttgcattaaaaagcacttcaggtttatgttgacgttgctcaaataaatgaactaaagattcagtcgattgaatacgacttgtcataatcgtttgtttgtaagagggtgtccaacgtttatttaatgtagcgcctgctaaattaataactacatcaatatctggcacttgattttcccatccttttttagaccagttaacatacgtaatcttaggctcatcactttgtttatcactacgggttaaaattgtaatatgagtctctctttttttaatttcatttactaaatgactacctaccattccagttccaccagtaattaaaaattgtttcatttactaacacctcattttttataaagaaaataaatttttttaatgacaatgtagagaaagatgctcaaaaagcattcaagattatgtcattaactttagaaaatacggtcattaaattacctaaatttagctataatataagtatagctttgctatagagaatagtagaatatttaaaaagtatgtttatacttttaatatactaatttacaaaacaaaagtcattttaatttctttctattctcttctctttcaagtttctattatattactttataaataagattaagaataatatgattataggaattaaaatgccaataaatatatcaaattttgagtttttactttcatcaaaatcatcattacttaacatcatagatttaattttattgcttgaatgatgtttaaataatgtgttaaaagtatcttttttcattttgtcactccaaaatttacatcatattgatagtgtagttatttatatatgatgttatcatgtataattgaatgagtattccatttatatatatacttaagtatttttaatatttttttaaaaggaaataatgtaaaatagattgctatattaaaggatgaatagataattaagaagtgagggagtccatgtcaaaaaaaaatagaaatcttaaagactatgaagcacatgaaaagaaaaaaatgagtggtatttctaaaataattagtacacttattgtgcttctattacttagtggattggtgtttgcagtttttgcttttgtggataattcaaacagagtcaatgaacgtttaaataatcagtcaacggaagaacataaagataagaaagataaagatactaaaagtaataaaaagaatgaagaaagtacgcaagaaaatacaacaagtgaaaacaatacaaataatagtaaagaaaataaattagataacgtaaaaaatccaaatgtaactgataactattctaatgagcaaaataattcaataaaagtacaacctactaatcaaggtaaaacagcacaaacgcaacaatcttctaaagaaacatctacaaaacaacctaatacaaatcaaattcaaagtactcaacaaaaagaaaacgcaccaactcaagaaaaagcaacgcaagaagaaacagataaatcaactaaaaacactcagtcaagtcaatcttctcgttctaatgcttcaactgaaacatcacaacataagtcaagtaacaatgacacaactactacacaagaacgagctaatacaaatcaatcatcccaaacacaaaaatcaacgatgcaaccatctactaccgaacctaaaacacaatcatctagttcaactacttcagaatcaaaaagtaatacccaacaatctcaaagatcttcaaacgaagaataaaaaaagacctaggtatatacacattttaccatgtgtgtatctctaggtttttttaaaatatccagttaagcaagaatgttaagataattgaaagaacaatcgatataaaaatagaagagaaacaaccaaaaggacaaccacaaccatagtgatatcgtattgtattgtgatgttcagacatatctcgatattcttgttctcttttaaaatagtcatcatctttatatctattatcagaaggatctaaaacttctacatccttattgtctttatatttcaaagtgattcctcctatctagttaatgtttaaattataattcatcatttttgaaaaacctataaggttaactctattgcatttactataccctattttaaatatttaacagattatttaaaataataaaggttttcacttgcttttttataacgacaatagtagtattgcaattgtaaagaggttgaattttgtcccacctgggacaaaaaaagtcaaaccccctctaactctcgattatcttttgagaaaaataggaggaaggtagtagtgaaagacctgattaaactacaacaaaagttggttcctgacttagttgataaaatgtatcgacgtttctctatcttaacgacaatttcaaataatgaacctgttgggcgtagaagtttaagcgaacatatggatattacagaaagagtcttaagaacagaaacagacatattaaaaaagcaaaatcttatacaagtaaaatcaactggtatggaaatcactgaagaaggtataaaagtacttaatcaattaagtgattactttaaagtgtataaagatgataatcattatgctaaacatattaagtccaactttggaattaaagaagtatatgtcatacctggaaattctgatatacatgaagaagttaagtctgagatgggtagacaagcaggtcatttactagaagatatattgtacgaagatgcaattgtatcagtgacaggtggatcaacaatggctaatgttagccgagcaatgcatttattaccatttaatgtgttttttgttccggcacgtggtggtcttggtgaaaatatggtttatcaagcaaatacaattgcagcaagtatggcacaacaaagtggtgggtattatactaccctatatgtaccagataatgtaagcgaatcaacatataatacattactgatggaaccatcagttgtgcacacattagaaaagattaaacaagcaaatataacaatacacggtattggtgatgcgctgaagatggcgcatcgtagacaatcatctgatgaggtgattgaaagacttcaacatcatcaagccgtcggagaagctttcggatattattttgacgctcaaggtcatgtagttcaaaaagtaaaaactattggattacaacttgaagatttagaaagcaaagaatttatatatgctgttgctggcggcatgtctaagggagaagctatcaaagcatatctcagtattgctcccaaaaatacaatattaattactgatgaagcagcagctaaagtaatactaaataaggaataaaaagttatttaactttttaaatatcattttaaaggaggccattataatggcagtaaaagtagcaattaatggttttggtagaattggtcgtttagcattcagaagaattcaagacgtagaaggtattgaagtagttgcagtaaacgacttaacagacgacgaaatgttagctcatttattaaaatatgacactatgcaaggtcgctttaacggagacgtagaagttgttgaaggtggtttccgtgtaaatggtaaagaagttaaatcttttgaagaaccagatgcaagtaaattaccatggggcgatttagatatcgacgtagtattagaatgtactggtttctatacagaaaaagaaaaagctgaagcacacattaatgcaggagctaaaaaagtattaatttctgctccagctaaaggtgatgttaaaactatcgtatttaacacaaaccacaaagatttagacggatctgaaacagtagtatcaggtgcttcatgtactacaaactcattagcaccagttgctaaagttttaaatgacgaatttggtattgttgaaggtttaatgacaactattcacgcttacactggcgaccaaatgactcaagatggtccacacaaaaaaggtgacaaacgtcgtgcacgtgcagcagcacaaaacatcgtacctaactcaacaggtgcagctaaagctatcggtaaagtaattcctgaaatcgatggtaaattagatggtggagcacaacgtgtaccagtagctactggttcattaactgaagtaacagttgtattagaaaaagaagtaacagttgaagatgttaacaaagcaatgaaaaatgctgctgacgaatcattcggttacactgaagatgaaatcgtatcatcagatattgttggtatgaactttggttcattattcgatgcaactcaaactcgtgtcatctcagttggcgacaaacaattagttaaagtagctgcttggtatgacaacgaaatgtcttatacttctcaattagtacgtactttagaatatttagctgaattaactaaataatttcgtagcctagtttaataaaaacttgtgctcagtacacttatataaaatgttgaattaagttagcttatgagtaagcggggagcactaacgcttctccgcttatttttatattaataattcctatttaaaggaggaaattataatggcaaaaaaaattgtttctgatttagacttaaaagggaaagttgtacttgaacgtgctgattttaatgtacctttaaaaaacggtgaaattacaaatgataaccgtattgttcaagctttaccaacaattaaatatattttagaacaaggcggtaaattagtattattctctcatttaggtaaagttaaagaagaaagtgataaaaaagagttaactttaaaaccagtagcggattcattaactgaaaaattaggcaaagaagttgtgtttattccagaaacacgcggtgaaaaattagaatctgcaattaaaaatttaaatgaaggcgatgtattattagttgaaaatactcgttttgaagatttagatggtaaaaaagaatctaaaaatgatcctgaattaggtaagtattgggcatcattaggtgatgtgtttgtaaatgatgcatttggtactgcacaccgtgaacatgcttcaaatgttggtatttctactcatctagaaacagctgcaggctacctaatggaaaaagaaattaaatttatcggtggtgtggtaaatgatccacataaaccagttgtggctattttaggtggtgctaaagtatctgacaaaattggtgttattaaaaatttagtgaatatcgctgataaaatcattattggtggcggtatggcatatacatttttaaaagcacaaggtaaagaaattggtctatctttattagaagaagataaaattgactttgctaaagaacttttagaaaaaaatggcgatcaaattgtattacctgttgattgtaaagtagctaaagaattttcaaatgatgctaaaatcactgaagtgtctattgatgaaattccaagtgatcaagaagcaatggatattggaccaaaaacaatcgagttatttactaaagaattacaaggtgctcacacagtagtatggaacggacctatgggtgtatttgaatttagtaattttgctaaaggtacaatcggtgtatgtaaagcaattgctaacttagaagatgcaatcacaattatcggcggcggtgattcagcagcggctgcaatttcactaggatttgaagatgatttcactcatatttcaactggtggcggtgcttcattagaataccttgaaggtaaagaattacctggtatcaaagcaattaacgataaataatatttatttgaataataaaaatgtttcttttatgattttcatgggaaaacaataaaagaacgtaaatatttataattaagtttaaatttattaataataggagtgtcaataatgagaaaaccaatcatagctggtaactggaaaatgaataaaacagttcaagaagctaaagactttgtaaacaatttacctacattacctgatgaaaaggaagttgaatcagtaatttgtgcgccaacaattcaattagatgcattaatctctctagtgaatgatggcaaagcaaaaggattaaaaattggtgctcaaaacacttattttgaagataatggtgcatatacaggagaaacttctccagtagcattagctgatttaggtgttaaatatgtcgttattggacattcagaacgtcgtgaattattccatgaaacagatgaagatgtaaataaaaaagcacatgcagtatttaatcatggaatgacaccaattatttgtgttggtgaaacagatgaagaaagagaaaatggcaaagctaacgaagtagtaagcaaccaagtaaaagaagcagtaaaaggcttgtcagaagatcaacttaaagaagttgttattgcttatgaaccaatttgggcaatcggtactggtaaatcagctacttcagaagatgcaaatgaaatgtgtgcacaagtacgtaaaacagtagcagacgtgtctagtcaagatgtagctgatgcgactcgtattcaatatggtggtagtgtgaaaccaaataatgttaaagaatatatggctcaatcagatatcgatggtgcattagttggtggcgcatcacttaaagtagatgattttgtacaattgttagaaggtgctaaataattatggctaaacaaccaacagcattaattattttagacggttttgctaaccgtgaaagtgaacatggtaatgcagtaaaacaagcgcataaaccaaattttgatcgttattacaacaaatatcctacgactcaaattgaagcaagtggtttagatgttggtcttcctgaaggtcaaatgggtaactctgaagtaggtcatatgaatataggtgcaggccgtattgtctatcaaagtttaactcgtattaataaatccattgaagatggtgatttctacgaaaatgaagtgttaggtaaagcagctcaacacgttaaagatcacgattcagcattacatgtatttggtttactttcagatggcggtgttcacagtcattacaaacatttatttgcattattagaacttgctaaacaaaaaggtttagataaagtgtatgtacatgcatttttagatggtcgtgatgtagatcaaaaatcagcaattaaatatattgaagaaacagaagctaaatttaaagaacttggtgtaggtcaatttgcatcgatttcaggtcgttattacgcaatggaccgtgataaacgttgggatcgtgaagaaaaagcttataatgctattcgcaatttcgaaggaccttcttatgcgagcgctaaagaaggtgtagaagcgaattatgaaaatgacgttacagacgaatttgttgaacctttcatagttgaaggacaaaatgaaggtgttcaagatggtgatgctgttatcttcttcaatttccgtcctgatagagcagcacaattatctgaaatatttacaaataaagcatttgacggctttaaagttgagcgtgtaaatgatttattctatgcaacatttactaaatataatgataatgttgatgcagaagtcgtatttgaaaaagttgatttaacgaatacagttggtgaagttgctcaaaataataatttaaaacaattacgtattgcagaaactgaaaaatacccacatgttacttatttcatgagtggtggacgtaatgaagaatttgaaggtgaacgtcgtcgcttaatcgattcacctaaagttgctacgtatgatttaaaacctgaaatgagtgcatacgaagttaaagatacattgttagaagagttagataaaggtgatttagatttaattattttaaactttgctaaccctgacatggtaggtcatagtggtatgcttgaaccaacaatcaaagcaattgaagcagtagatgaatgtttaggtgaagtggttgataaaattttagatatgaatggctatgcaataattacagctgaccatggtaactcagatcaagttttaactgatgatgatcaacctatgactactcatactacaaacccagttccagtaattgttactaaagaagatgtaacattacgtgaaactggtcgtttaggtgacttagcacctacattactagacttattaaatgttgaacaaccgtcagacatgacaggtgaatctttaattaagcattagtaaagttgtaaatactaagatgatttaatattattctttaatattaagtcatcttagtataaatattttattaaataacaaaaaatagttataataattaaggaatctaaatttaaaggagattatttattatgccaattattacagatgtttatgctcgcgaagtattagactcacgtggtaacccaacagttgaagttgaagtattaactgaaagtggtgcttttggtcgtgctttagtaccttcaggtgcttctactggtgaacacgaagcagttgaattacgtgatggagataaatcacgttatagcggtaaaggtgttacaaaagctgttgaaaatgtaaacgaaattatcgctccagaaatcgttgaaggtgaattttcagttttagatcaagtatcaattgataaaatgatgattcaattagacggaacacctaacaaaggtaaattaggtgcaaacgctattttaggtgtgtctattgccgttgcacgtgcagctgctgacttattaggtcaaccattatacaaatatttcggtggatttaacggtaaacaattaccagtgccaatgatgaatattgttaacggtggttctcactcagatgcaccaattgcattccaagaattcatgattttaccaactggtgctgagtcatttaaagaagcattacgttggggtgctgaaattttccataacttaaaatcaattttaagtgaacgcggattagaaactgctgtaggtgacgaaggtggttttgctccaagatttgacggtactgaagatgcagttgaaacaatcattaaagcgattgaaaaagctggttacaaaccaggcgaagatgtattcttaggatttgactgtgcgtcatctgaattctatgaaaatggtgtatatgactacactaaattcgaaggtgaacatggtgcgaaacgtagtgcagctgaacaagttgactacttagaagaattaattagtaaatatccaatcattacaattgaagatggtatggatgaaaatgactgggacggttggaaacaattaactgatcgtatcggggataaagttcaattagtaggtgacgatttattcgtaactaatactgaaattctttctagaggtattgaacaaggtattggtaactcaatcttaatcaaagtaaaccaaattggtacattaactgaaacatttgatgctattgaaatggctcaaaaagctggttacactgcggtagtatctcaccgttctggtgaaactgaagatacaacaattgctgatatcgcagtagcaacaaatgctggtcaaattaaaactggttcattatcaagaacagatcgtattgcgaaatataatcaattactacgtattgaagatgaattatttgaaacagcaaaatttgacggaattaaatctttctacaatttagataaataattttagtgacatactaaaattaatagagttcacgcgtttgcctgtcatagagttgagactatgacaggctttttttaatataaaattttaaataatagcctcgaagtgtaagatttaacttcattgatgaaactgatataataatcctgtaattgaaagaaggagaattgaagatggatcaacaacttaatcagtcaaataaaagagaacgtattgccggtcaatggattggatatagttcgcttgtattttgtatattattaattatccataattttattgctttagatgctcacactgctaaaacactgttaacactagcacatcaagaagcatcaagcagtgcagtagataacattttaaatagttttagatatacaggtattatgtatattctcgcatatttagctggagtaattgctttatggaatcgacataaatatctttggtggtttatgtttgccgtatatgtatcaaatgtattatttacacttgtcaacttaacgatggtgttaaatgctattattgaaacaaaatctattttatttattttacctattttaatcgtcgtgattggttcaacaatattagcaatatatatgttaattatttcaattgtacgtaaaagtacatttaatcgatagtatttgataactatattaagaatatgttataattcggaacgtatataatgaacggaggacaattttcatgcatacattatttatggtcttattaattattgattgtattgcattaattactgttgtattactccaagaaagtaaaagtaatggactttcgggtgcgattagtgggggcgctgaacagttatttggtaagcaaaaacaacgtggcgtcgatttattcttgcatagattaacaattgtgttagccatcattttctttttaataatgattggaataagttattttggtttataaggtccgacgatatcaatgtcgggcttttttatttataatagagttaacacattttataatgaaatcattattttaatatgatcatcaatgcatatttttaagctattaagggaataaaatagattgattatataatgaatacaatctattagtacaaaataaaaaagtaatcatattataatttttgttagagagggataaaaaatgcaaattaagttacctcaacctttctttttccaagaaggtaaaagagcagtcttactcttacatggattcaccggtaattcatctgatgtaagacaacttggtagatttttacaaaaaaagggttatacttcctatgcaccacagtatgaagggcatgctgcgccaccagaagagatattaaaatctagtccatatgtatggtttaaagatgtacttgatggctatgattatcttgtagaacaaggttatgaagatatagcggtagctggattgtcattaggcggtgtatttgcattgaagttaagtttaaaccgtcctgtaaaaggtatcataacaatgtgtgcacctgccgaagtaaaaacagaaggtacaatctatgaaggttttttagaatatgcacgtaattttaaaaaatatgaaggtaaagaccaagcaacgattgataaagaaatggaagattttcatcctactgaaacactcaaagaacttagtgatacgttaagtcgtgtgcgtaatgatgtagatgaagttttagatcctattttagtagttcaagctgaaaaagatgaaatgattgatcctcagtcagcaaattatatatacgaaaatgtagattcagatgaaaaacaaattaaatggtatgcaaattcaggacatgtcattacaattgataaagaaaaagaacaagtgtttgaagatgtatatgcgtttttagaaggattagactggtctgaataaatcataaaaataattgattaaagaaaggaggggcatgatgaatttaaagcaatccattgaagaaattgtaaaacaacctgattatgaaccgatgtctgtatcagactttcaagatgctttaggtcttagtagtgccgactcatttagagaattaataaaggtgctcgttgaacttgaacaagcaggattggtagagcgaacaaagacagatcgctatcaacgtaaagtatcaaataagaatttaagttcaaaattaataagaggtactttaagtcaaaataaaaaaggctttgcttttttacgcccagaaaatgaagaacttgaagatatttttattccaccaacaaagattaatcgtgctttagatggagatacagtaatagttgaattacaaaaatccagaggagagtatcgtggaaaagttgaaggtgaagtaaaatctatagaaaaacactctgtcacacaagtagtaggtacgtatagtgaagcaaaacattttggttttgtcattcctgacgataaacgtattatgcaagatatatttatacctaaaggacagagtcttggagccgtagatggtcataaagtacttgtccaaatcacaaaatatgctgatggcacagataatccagaaggacatgtgtctgctattctaggtcataaaaatgacccaggagtagatattctttcaattatttatcagcatggaattgagattgaatttcctgatgaggtattaaaagaagcggaatcagtccctgaagaaataaaacctgaagaaattaagggacgaagagatttaagaaacgatcttacaattacaatagatggtgcagatgctaaagatttagacgatgcaattagcgttaaacgtctagataatggccatacggaattgacagtaagtattgcagacgtaagttattacgtaaaagaaggctctgcgctagataaagaagcttatgatagagcaacgagtgtatatttagtagaccgtgttattccaatgattccacaccgtttaagtaatggtatatgttcattaaatcctgaagtagatcgtttaacgttaagttgtcgtatggaaataaatgagcgtggcgaagtggtggatcatgacatatttgatagtgttattcattcaaactatcgtatgacatatgatgcagtgaatcaaattattaccgaaaaaaacacagaagtgcgtcaacaatacagtgaaattgtcccaatgttagatttagcacaagatttatctaatcgacttatccgtatgcgtaaacgtcgtggtgaaattgattttgatattaatgaagctaaagtgttggtcaatcaagaaggactacctacagatgtaatattgcgagaacgtggtgaaggagagcgtttaattgaatcatttatgttagcagccaatgaaacagttgctgaacattttaacaaattagaagtgccatttatttatcgtgttcatgaacaaccaaaatcagatcgattacgccagttcttcgactttattactaattttggtattatggttaaaggcacaggtgaagatattcatccttcaacattacaatctatccaagaagaagttgaaggtcgttctgagcaaatggttatttcaacaatgatgttacgttcgatgcaacaagcacattatgatgatacgaatttaggtcatttcggcttgtcagcagaatattatacacattttacttccccgattcgtcgttatccagatttaactgttcatcgcttaattcgtaagtatcttgtcgatcactctatgaatcataaagagatgcataaatgggaagaaacattaccagaattagcagaacatacatctcaacgtgaacgtcgcgcaattgaagcagagagagatacagatgagttgaagaaagcagagtatatgattcaacatattggtgatgaatttgaaggtattgtaagctctgttgccaattttggtatgttcgttgaattaccaaatacgatagaaggtatggttcatatttctaatatgacagatgattattatcaatttgatgaaagacaaatggcgttgataggtgaacgacatgctaaagtgtttagaattggtgatgaggtaaaagttaaagttactcatgtagacgtagatgaacgcatgatagatttccaaattgttggcatgccattacctaaaaatgataaatcacagcgtcctgctcgtggaaaaacgattcaagctaaaacgcgtggtaaatctttagataaatccaaagataatcatcataaaaacaaaaagaaaaaacgtaaacaacgtaagggtaaaaatcaacgtcaacgtgataaacaaagctcaactaagcataaacctttttataaagataaaaatattaagaaaaaagcgcgtcgtaagaaaaaataatcagcaaagaggtgacatacagtaatggccaagaaaaaaacaaaatcaccaggtacgttggctgaaaaccgtaaagcaagacatgattataatattgaagataccattgaagcaggtattgcgcttcaaggtacagaaattaaatcgattcgacgtggtagtgcgaacttaaaagatagttatgcacaagtgaagcgtggagaaatgtacattaataatatgcatattgctccatacgaagaaggaaatcgttttaatcatgatccattacgatcaagaaagctgttattgcataaaaaagagattatcaaactcggcgaacgtacaagagaaattggatattcgattattcctttaaaattgtatttaaaacatggacaatgtaaagttttattaggcatagctcgtggtaaaaaactgcatgataaacgtcaagcattgaaagataaagcaatgaaacgagatgttgatcgtgcaatgaaagcccgttattaagcataattgttgcttaatcgggctctatttgttatgataagtaaagttgtttaaattaaactgtatcttgtattttattatattgtgggggcgtttttggattcgacaggggtcccccgagcttattaagcgtgtcggagggttgtctccgtcatcaacacattcggttaaatataactgacaaatcaaacaataatttagcagtagctgcgtaatagcgctctgcatcgcctaacagcatttcctatgtgctgttaacgcgattcaaccctaataggatatgctaaacactgccgtttgaagtctgtttagatgaaatttaatcaaactagcatattgttggttgtctattgcttaccaatatgcgaaatgaatcaatagactacacacgtagaaagatttgtatcaggacctctggacgcgggttcgaatcccgccgcctccatcttatagcttgtaaccctattggttgcaagctttttatttttattgccccaatatagcccccaaatatacccaataaaaatgcaccctataattaagatgcaatatttttgtataaaactatttcatttttatcattgtgaatttcaaggataatatcatgaattttctcatcttcactataagtatctttcatttcattatatttaaaatatgctaactgtctatttgttgagtgatcaataattattatatcttttcttaaatagtcacattttatttcataatctgtttcatttataatattccagttaaaaattttcatttcatcacctcataaatattttacaatttctttttgtgtactaggatataaatgtccgtaacgtgtacttatttcttcaatagataatgtcctaatctttgtgcaataaccattaaactagtaccgtgattaatcaaaagtgacccatgactatgacggatttcatgaattacaattctaggaaaataattagtttagacgatgtgtttatgtcgaaaaagattattgtgcgttgagaagaatttttaaaaaggggctttaaatattttggagtttttgtacgtttgtaaaaaaatcatagatattctagttgctttagcaacagtttttgaagaaaaaacagctaaattattagttaaaatcacaaagaaagagaaaaaatagaatacggcatttatatctagaaatttattgtacattgagaaatatacttaactaaatttgtaaattaatgtctacatagcgtgagctattaagtagaccatttgataatgtttgggttggttaagagattcgaggctcaacgtcagtaaagtaattaggaggtttgatttatagatgtatcgctatgatattacacatattattgctctgattttgaatatattttttataatatttatgccattaacttttaaatatgggaatgtatatataacgattatctggataatacttggagcgataaatgcaatttatatttatcgtaagaatacaaaaatgaaaaaagatcaaagcaacaaaaaaaagttgagataaagcaaataataggttttggttaatctaattttttattagttttgggaattacatataaaagtaagatacaaagaattatgctttgtattatgatagaccatagtaatatattttctctcttgattatcagaaaaaatatatctaaagctataggtattatagagaagtaaagactataactgaaaaaatgttttatatactttccacaaatgatttgtcctttgtcccagttatgttgagtttttattgatttttttgttctaaatccgtagaagcggtttatctttttaggtgggtttttaataattaaatttcctagtaaaatcataaaaatacttgaaggaaataaaagcatttgataacttcctttttcatgtttttgaagagcttctttcttaatattatatagaaataatgcaaagaaaaaaataatgtaagtatgatgttaataaattaaagaatgatgaatacttttgactaacaccagatataagtcagttagtctaggacaaaatagaaataacgaacttttatggttagtaaatcaactgtggtgattaaatgtaatgaaattttatatttacatttatgtgataaatcatttcatctcaaatatacaatgtttttaaatttctaaatttcaattgtttattgtaataacattaaaacgttgatatattaatgtttgtaaggtttttttaatatatattagggtagttttaaagaaaatagtttataatttaattgtttggagagaagtaatgaacaatcaaacaaaatattttcatcatgtagaacatagaaaatttcaaagtagttcaaaagcaacgctttggtcttctttaattattacgttgatttttacaattgtagagtttgtagggggattatatgctaattcacttgctttattatcagattcattccatatgttaagtgatgttttggcactagggttgtctatgcttgctatttattttgcaagtaaacctccaacgaaacattatacgtatggatttttaagattagaaattattgtagctttcttaaatggtttagcattaattgttatttcgttaggtattatgtatgaaggcattttgagaatcatacatcctgaatcggtagcaagtggtatcatgatatttgtagctgtattaggtcttattataaatatcattttaacacttattttatatagatctttaagaaaagaagataatgttaatattcaaagcgcattatggcattttttcggagatttattaaattcaattggcgttatcgtagcagtagtacttattcattttactggatgggaaattattgacccaatcattagtatcatcatttctcttatcattttaaatggtggatataaaataattaaaaatgcttggaaagtgttaatggagagtattccagatggatatgattcagatgaaattattaatgcaatgaaaagcgttgaaggcgttatagatgtgcatgaatttcatttatggagtatcactacaaaccatagttcattgagtgctcatgttgttttaagtgatgaatatactaaatggccatattcaacggttaataaagtttctgaattgttgaaagaaaaatataatttagaacatgttacactacaaattgaaaatattcatcttaaccatttagatgaagattactttaaacaatacgaagaatgataattaaataagagtagaagcgatggatagtaagagcgcttctactccttatttttagtttttatttatttttttactatctacgcgttcagaattgcctttagatttgtgtgcttttggattattttttttatgtgcactttcgtttacatctttgactgtatcattactatgactacatgcacctaatactagaaagcttgaaagtgttagtaaggctaattttttcattgtctcatccctttgttttaagtcgtatcatattttagtatggcatattaaatgtaatattcaataaatatttataagttttaaaaagaagtcgaaaataaaaggtagagcctcaaaactctaccttttttattattaattgtttatttggtttatattattattcgtattaccgctttgtgtattttgagttgtatttgatgtgctattttgatttacattattagtgttgttttttgttgtattagattcatttgtatgattatattgagtactattttgactattctgggtttgagtagaatttgtttgttttaaatcattatttgctgaattcgtctgatattgagatgtgtcttgttggtgtgttgaaggttcttggtgtcgttgtgtagaattttggttatttgtagtcgcattattttgttcagtagttgggttttcttgttgtgtagttggtgattctgatgactgaattgaatgttcttctgtggcgggtgtgttttcttgagtggcaggagtgtcctgaatagactcatttgatgtatccttatgatctttcttagaattattatcttttttattattattttctttatttgttttattatctttaggcttttctttttttacaggagtgatgtcacttttagagggattattactctcaatgactttatgaatacccagtgcaagcatacttaataagataataataatagccatagcaagcatttttaagtaatttttattcttaaaaatagcaataataccaaaaataatgactatacatgcgattaaaaataaagtaatgcctagatagaatataatgttatccataactgacctccataattacaacatatcaatcaaatattactataattattacataataaatattaatatttatttaacattttattatttttttaaaacaatttagttaataaaattattaatataatagtgttattcattcgatttattgtaaatgttaatttcttcatttttaaaattgattgaaacatataactggtcatcatatgtattaataggaagacagggtgtattcagtttaaactctgatagaattttaaatgaaccattatttaaaggttcaactatagatacatcattttcgttttgttgtataagtagatttctattcgtcatattattaattttccaatgattcatgtaaactcacctctattaaaaataaaaagcctgaaacatactcaatacatatgtgcaggctttaaaagttatattcatagttaaataaatatatttatttaagacttttaagcaaagatccttgaataggaataacttgaaaaaattggatatttttaattaaagctttgttcaatttcagtaaaagctttatttgtaactttaatattatcaattctatcagacataatattaccatctagatagccatgatcaataagaactttacaattttctaagaaatcgctatattttctatcgcaaaaataatcatcttgagctgtaatactatctttaaaattatttgcttcttcctctgtttgaccactatttgaacgttccatatatagcttataaaattttgctactgtatatttttgttcgttagttaattcgtccatagaaacgcctcctaaactcattacttatatatacccaatttaatttaattaaaaaactaaaaaaacgatattacatttattgagcttttttaataccttgatctactgcttcggcaaatctataaaatgttctcgtataatttttgggggatcgtctattatttttatccaagttgttatgtttaaaaaacaaagctcgttggcgagtcgtcaattctagttgcactcctgtatcttttttatctctattaataatattattattggaaagggcctcaattcctttaggcgttttttgtactgtaaatccatgatcagttaatgaatgacgtaatgtttgaaccaattttttatcttgaccacctacgtaaacaatgggttcatcgcctgcatatccgtgaatagatactgtttttgacgaatggttgagcatatctaataattgaggttcatcaaaaacagtagaagtaatatgtagttgagcattattatctgaacgtagaccttcaaatgaataaaaattatattgaccaatatttgaaatacgacgagcgagttcagtggttccaggttcaatacttccaccatgaatcgctgtaattaaggtatcgctgtgcttacggtgttttgtgattattttccaatctttattttttgttgtatgttgttttaaatcattaaagttagcatagtaatctaaagattgattttgttttaaatcaaaatgtttataaaagtaaagaaagaaaagaataaataatataataataagagttaaaaacatataataaaaaaatcgataatgtaattttttgtttttcataaaaataagttgttcctttaaatatcatttcttagtatagaaaagtatagcgtaacgccatagtctttaactattagtatttttttacgagcttaaggcgatagtcattattaaaattatcaactaaagcatatggagagataatcagtaaaccatgatcatttatcgtatctttacttacaccgtatttatatgcttgataaataattttagtacaatatgtaaaacgttcactttttaaattaagtgtaactaaataagttttatcactatttttataatgagcttttgcccaatcagctgctttttgacctgcattaggatattcacaacgatatactttaatccaatcattttttttaacgccaaatcgctgtttaaatgattcgaaagattcagtaataggcttatcgccgggtccttcaatttgtaaaacagtatcatgatctaaagcaatacttgaatgtccaaagaaaccaaataataccggaccttttgtaagaataatgtcaccaggttgtaatttgaaatcatttccttttcctgaagatgaagaagtggaacttatagatgcataagtatgagaagggaacgcgaaaaatagtaatgaaatgaaaataacaaatataatacgcttcaattgaatagtcttcaatttatatctccttaattgttttatagagaaatatataaaaaagaacaaaataagattgtattttgttcttttaaactctatttataaaataccaaatattagtacatatatcagtaaagcaaaaccaaaaatataaaagatgactgtaaagcctaaatatgattctttacgttcttcttttttagattttagcaataaccctaatataattgaagcagcaacaacaaatataatacccagccaaagtaaaattgttaaatgtgtactcatttgtaaacctcccacattttaattaaaaaaagttatatatcagtggatatatataatataaaaaaatgattagattagttaaaaaaattatttcgcttataaggtttttatccaaaatagcggcaattaaactgaatgaaatagtaaggccacatatgattaaaccaggtatgagccaaaaataatcatctaacttaggaaaataggtgacagtaatattaaaacctagaaataaaagggtaatcataatattaatccaaaataatttattaatattcataggtagtgtcacctctataacaatgatgtcttttttatcatcatatcacttctttaaaagaaaggtaaaactttaattcttattaaaagaattacttcgtaaattcacagaaaaaagctggcgattaaactaaaatatactcatcggcagtcataaatatgtatgattacactaataaacatatcaattaaaaggggaaatcagaaaagtaaatagaagagtataaaagttcaaaaaatcgtcacatttacagaaagttaatatccgcatagaatgtttttagtgaataattaaaaataaagtgttttaattattttaataaaatcaattaaaacattacaacttttataaaaatctaacttactgatttgcttatataaataaacatcactcatttagaaataataagatgataggagatactgaaatgttgtaatgtgaggaggaaaaaatgacattttatgattttgttattggatttattaatgatgatacaccactaggaagtttagcaaactacattgtaaatgatcataaatttcccaaaaacgaacgcaataataaagaaattagagcatatgttatgtcaaattacgttgatcaccaacttatcgaaagcgctaatcgagcaattagcctctataaattaatttgaattaggatagtaccaattttgttgctttagcgcattccatatatctttagttttaaagtttaattcattatctctaattgaaaaaggttctataatttctctatctaaccacgaatgaataagttcactaggaactccatcaagtaacatttctgatttacttattacaaaacattcccaatctaatgagaggttattaggattgacataattgtattgattatgatcattcataatgaacgctcctttatttataaaacttataattcattataccccttataatgagaatcaaacgtgtagtaattaattttttacctttagttatttttaagtataaaaaaattaaggtatactatgtatggattataaagtggtgtaaaagaaagttgcctatattatttaaaaaatatattgaggtgaatgtaatgagtaaaatactctatttaatgagacatggacaaactatgtttaatttaagagggaaagtacaaggtgcaagtgattctccacttactaaattaggaatatctcaagcgaagcaagcaggtcattactttaaacataatcatattacttttgacgaagcatattcatctagttcggaacgagcatgtgatacgttagaaaatgttttacctgatcaagcatatcaacgtaataaaggattaaaagaatggagttttgggctatttgaaggagatagtgttcaattattggatgcagtttgggataaacacgatatttttggaactagactacgtgctttcggaggagaaacgaaaagtgaagttgaacatcgtatcgtcacaacattaagtaatttattagagtcctctaatggaaaaacattcttagcggtaagccatggtacagccattcaggtttttttaagaaaatggataggtgatgatatggcaaatcaatatatcattggaaattgttgtattttaaaattcatttatacacatggaaaatttgaatttctcgatattgttgatcctacaatcgatgatgtcaataaataaaattattatcctggctatttaatatcatagagtagccaatgaacatcgaaataagtatcatctactttaaatgagtttttttcaatccctaaagtttcaaaaccaagtgcagtgaaaaaaatctttgcactaatatgattggacgtaatacaagtcattagtttttcaatatgacgagcctttgcataattaatcacttcacagattaaattttgcaaagtaatctcgtcttttttgtcttttaaaaagagattttctaacattgctttatgttgtgtgcctacttgtttgagttgtcgcaatgtaacaccagccacaagtttttcatttttaaaattgccaaaaatattacaatactcttcttctttagatagaatgtgttttaaataatttggagacacatgttgaaaataaagtttatcccatgaataagtatgtgaatcatttgatattaaagtaatatattgatttaaatcattgttagtaagaattctaacttctgacattatactcacctcaaattatcattagcatttaataatctatttatacaaattaattgaattataaatattttataaactttaattaataactatatacatagaatagcttattttaaaaaattatacaaaaagtgtgagaatatatagacattaaaataatatctatcatacatcgatatttttaaacttaattttttagataggaaatgggcaggataggattcaatttgaactcgtcgttcaactctagcaatacagccccaagaacgtagatgtttttattgaaagtctttacgttaacttccgtactactattgaaataacttgatatcagctcttttcaattcaacctttatctatcaacataaaaaaatcctgagacataatgagacgtcccaggattttttaaaattataaaatttagattttaaagcgtaatactaattagtcaacaacttgaacatttaaatctacatcgatgttgccacgagttgcttttgaatatggacagaattcgtgagcgtcttgtagatatttttcagcatcttcttgagataatacatttttaacttttgcatcaatagatacgcttaattttggactttcagcatttggatcatcttctaagcgtacagttaaagttacctcaggttctgccccacgaactttgttttgttttaaaataaggtcatatgcaccattgaaacatgaagcatagccagctgcgaataattgttcagggttagttgcttttccatctgcttgttgtggtggtaatacatctacatttattgcattatcgtctgtgtgtacgtgtcctttacgtccaccaacgtttgttgctttagtttcatattgaactgccattattattacctcctaaattcgaatataattattgtatacccaactaaaacgttttaaatcatgatttgtaaaaattaacatgaattttaaacattggcgagtgtgacataaatagtttaaaataatataaaattgtaaatggtaagaaaagaagggattatatggcagaagtaaaggtagctgcaaccatagcacctcaagatataatagataatgaaacgttaaatagtataaatgataatcatgcatatatagatatcattgagttgcgtatagatcaatgggagagtcatcatcacgaacatttaatgaaaaacctttcacttctaaatgaaataaagggtcatttcaaaatattggtgacatatcgcacactttctcaaggtggaaaaggtcagttaactaataaagaatatttacagttaattgaaacaatttcctcaatagatgtatttcaaatgatagatatagaatgggagtcaaatatagatgttgagacgcataaacgtattatagaaaatgcacatcgtcatcagaagcaaataattgtctcatatcataattttttagaaacgccaccgttagaagaattaaaattcacatattataaaatgctaaaattaaatcctgagtatgtaaaaattgcagtaatgcctaaggaaaatcaggacgtagcaacgctattagaagcagtagcttacacatctgaagcgatttctcaacaagttattgggatatctatgtctcgtttaggattagtgagccgaactgctcaaggtgtttttggggggacagtgtcatatggttgtttaggtgaacctcaagcgccaggacagattcatgttaaagaactaaaaaaacaattattattttacgaaaacatgtagtatacattgaaatgtcatcgatatccgcgtataattgataatagttatcaatatagaggagcgataattgtggaattacaagaagtaatttctttaagaagaagtataaagaaatttaaacatgatatggttattaatgatgaagatgtatttaaagccatagaacaagctactgacgctcctaatcatggtatgagagaaccgtggagagttattcatgtttctaaagatagattaggagatatgagtagagatattacacgttttgcctttccaaatagtccggaaaaacaagaagatcattataacgcggtgacaaatttaggaggtatgttagttttagtacttaaaactgacccacgacaacgacaaaatcgcgaaaacttttttgcgatgggtgcatacactcagaatctaatgttattactctatgaaaaaggtattggtacatgttggaaaacgccattgtacatctttgaaccaaaagtaagaaaagcatttggtattgctaaagatgaagctattgcaggtttattgtatcttactgatttagaagaggttccacctaaagcaaaacgtaaaaataaacatttaatctcagaatattaaagaaaccacactcaaaataacgagtgtggttttttaattatttattaaatgtttcttttaagaatgattcaacttgttcaggtgattttgcattagcagaatgtaaatgggcatgtttttgaccattttcaaatataagtaaacttgggatacccatgacttcattgtctgatgctacatcttctaattcatcacgatttactgaataccatttatagtcgttatacttgtcaacgattggatcaatccacatatccattgctttacaatcaggacaccaaccagcttcaaattttacaataacaggttgttcactttgaataactgaattaaattcttcagtagtagtaatatttttcatactttacactccttttagcttgttttatatattataactaattactaatgtttagaaaaaaataaagcttaaaaagtagagcgtttatttaaataatctgatatatttagaataagtttaaataggaggataatactgaatgattaaattttatcaatatccaaaatgtacaacttgtaaaaaagctgctcgatttttagatgagcatggagtgagttatgagtctatagatattgtgcaacacacacctacaaagcaagaattcaaagagttagtagttaaatcagaagtggaaatcaataaattctttaatacacatggtgtgaaatatagagaacttggtttgaaagataaattaaatgaattatctaatgatgaaaaattagaactcttagcctcagatggaatgttggtaaaacgtccgctagcggtttcgggtgaaaaagttacattaggttttaatgaagaacaatataaagatgtatggttatagaaagtataatcacaacttttaatattaatagttgaatgaaaacttacggtatggcatcattaaattgtaattatttttaggaggggattttcgtggcagtaccgagcgaattcaaatattctaaggaacatgaatgggttaaagttgaaggaaatacggcaacaattggtattactgaatacgcgcaaggtgaattaggagacatcgtatttgtcgaattaccagatgtcgatgatgaaattaatgaaggggatacatttggtagtgttgaatcagtaaaaacagtatctgaattgtatgcacctgtttctgggaaaattgttgaaacaaacgacgaattagaagatagtccagaatttgttaatgaatcaccttatgaaaaagcgtggatggtaaaagttgaattaaatgatgaaagtcaattagatgaattgctatcagctgaacaatattctgaaatgattggcgaataattttaaaaaactccttgatattgaatctaggagttttttatatattatattaattatctgtaaattgtgtttatattcatcaataacgtgaaaaagtaaatgattgtttaatatcgacttagaaggtggatgaacatggcaattttaaacaaagttatcattgttgaaggtaaatctgataagaagaaagtgcaacaagtcatagctgaacctgtaaatattatttgtacacatggtacaatgagtatcgacaaactagacgatatgatagaaacattatatggaaaacaggtctatattcttgccgattcagatgatgaaggcgaaaaaattagaaaatggtttaaacgttatttaagtgaaagtgaacatatctatgtagataaaacatattgtgaagtcgcgcgttgtcctaaaaattatcttgctcatgtattgagtaaatatggatttaacgtaaaaaaagagaaaaaacttatacctaatttaagttctgaaaggttagtactcgtgaatgaataattctattaaaatcgaagacatcaaagaacactttgataaagataaacatttaatatttggatatactcctatgtgtggaacatgtaagatttcagagcgcatgctagatattgcaaatgatatcgaacaattaccacttaaaaaaattgatttaaatttccataagtattttagtgaagaatataaaattatgtctgtacctgtactgttaattatggataaggataaagaggtagatagaatctatgcatttcaatctgtgccatatttgttagaaaagttaaaaaaatgattgacgaattattagtacagtgataggatataaattaattaaatagtgcgaaaactcttatcgagagaggtggagggatgtgccctacgaagcccggcaaccgtctataatagaaatggtgccaattcacataaagtttaatactttagaagatgagagaaagataattttaaatgctttctcatctctctaggtggggaagcattttttaattatataaggaatttaagggaggcacttaacgtgattgagttaaatcaagttgttaaacgctatcacacaaagaacaaagatgtactagcagtagatcacgttgacttgaatatagaatcaggctcaatttttggagtgattgggttttctggtgctggtaaaagtacgttaattcgaatgtttaataatctagaagaaccgacttcaggggatatcattatagatggagacaatattaacaaactttctaagtcagatttgagaaaaaaacgacaaaaagtaagtatgattttccaacattttaatttgttatggtcacgtactgtcattagtaatattatgttcccactagaaatagctggagtatctcgtgcagaagcaaaacaaagagctttagaacttgtagagttggtcggtttaaaaggtcgtgaaaaagcttatccttcagaattatcaggtggtcaaaaacaaagagttgggattgctcgtgcattagcgaatgatccgaatgtcttattatgtgacgaggctacaagtgcgctagatccacaaacaacggatgaaattttagatttactattaaaaataaaagaagaaagaaatctaacgattgtgattattacacatgaaatgcaagtgattagacgcatatgtgatgaagttgcagtgatggaaaatgggcgtgttattgagcaaggtaaagttgatgaagtatttgaaaatcctcaacatgaggtgacaaaacgatttgtgaaagacgatttagacgacgattttgaagattcaattaaacatctagaaccattaaacaaagacgcttatattgtaaggttgaatttcaacggtaataataccacacaacctgttgtatctgatattacgcgaacgcagaatattgaattaaatattttggaagcaaatattaaaaatacacgtacaggttcagttggatttttaattgtacacattccacatattagtgaagatggatttaatacattcgtaactgagttacataaagaacacgtaaatgtggaggtgattaaacatggataaatcatatggtgatatcttccatgaaatgattactatgcctaatgtgcaatggcctgaagtttggcaagcaatttatgaaacactttatatgactatagtgtcaaccatttttgcttttatctttggcttaatcttaggcgtgttgcttttcttatcagctaaaagtgacgcacctggagctaagattttctatacggtagtttcatttatagttaacttgttccgtgcgattccatttattattttaattttgttattaattccgttcacaagtgtattattaggtacaattagtggaccgacgggagcacttccagcattaatcattggcgctgcaccgttctacgcaagattagttgaaatcgcatttaaagaaatcgataaaggcgttattgaagcagcatggtctatgggtgcgaatacttggacagtcgttcgaaaagtattgcttccagaagcaatgccagcacttgtttcaggtattacagtaactgctatcgctttagttggttcaactgctattgcaggcgttattggtgcaggtggtttaggtaacttagcttacttaactggttttacacgtaaccaaaacgacgtcattctagtgtcaaccgtatttattttaattattgtatttataatccaattcatcggggattggcttacaaataaaattgataaacgataatagaaaagaggacagattaaatgaaaaaacttttaagtttagtattagtacttacactgacagttgtattagctgcttgtggtaaaggcggagatgaaaaagataaaaaaatcgttgtaggtgcctcacctgcaccacacgctgaaatcttagaaaaagcaaaaccacttcttaaggaaaaaggttatgatttagaaattaaaacaatcaatgattacacgacacctaacaaattgttagataaaggtgaacttgatgctaactatttccaacacgttccatatttaaaaactgaaagtaaagaaaaaggatacaaaattgaagatgcaggtaaagttcatttagaaccaatggctgtttattctaaaaaatacaaaagtttaaaagaccttcctaaaggtgcgacagtttatgtttcaaataacccagctgaacaaggtcgtttcttaaaattcttcgttgatgaaggcttaattaaaattaaaaaaggcgtaaaaattgaagacgctaaatttgaagatattactgaaaacaaaaaagatattaaattcaataacaaacaatcagctgaatatcttccaaaaatctatcaaaatcaagatgtagatgcagctattattaattcaaactatgctattgatcaaggcttaagtccacaaaaagattcaattgtagttgaaaaacctaataataacccttatgcaaacctaattgcagttcgtaaagatcataaagatgatgaaaaaattaaagctttagttgaagtattacaatctaaagacattcgtgatttcatcaatgaaaaatacaaaggtgcagttgtacctgcaaaataatgaataataatgcagtaaaaaacggttcacaaagaaatatgtgaaccgtttttttattttatatcaatacatttattgcagtcatttatattataaacttgaatcgtcttgatatagtattccaacgccgataccaccttgacccatcgcatattcaaatttaacaatttctatatatggatgttcttctaagaatgcattgacttttttatttaaacctttttctgtcatagcagtaaaattaacaaatgtcatagttatcatctccaattggataagtaaattgaacaatgttattataacaattattttaattagacagaaaatataaaaaaataacagaatttatgtttatacatgatatgtattgggtatgttaatattacaaaaatcatttaagaatgaaatgttcaacaaggaggaatttaaaatggcagaagataaatttgaacaagctaaaggtaatattaaggaaacagttggtaatgcaactgataataaagatttagaaaaagaaggtcaaggcgacaaagcttcaggtaaagctaaagaagtggttgataacgttaaagataaagcaaatgatgttattgataaattaaaaggcgataaataagtcgttttaactagaagagaacgcatgtgttaaacacatgcgttttttgtttattttagaatattatgtctgagtatcattgttagacgtaattagtcctaatgaataacttactatatatcctattactaaagaaataatcgaaacaatccattctactggtgatttaggaattcctgggaatacagcataaattgaaccaataacaaaaccagtaattaaggcaaatgttccaataaagtggtgggttaaaaagtattttataatacggcttgaaaatagaaatccacataaaatacctaaaccaactactattaatataggcagaccggtaaagttaaatttagctaaattagcaatagctaacattattgttccatatgcaccgaatacaagtagcataaatgagccagagatacctggaagtagcattgcactagaagcacaaacacctgctataaaatatttaataataagactaaaagataattgaagtgttaaacttgattgctgtgtgctaggatttaatattgttaatgctactataactatgattcctaaaattaataatccatagtgtttagttgtaaatgtttttttaaaatctgaagtttttaataggtaagggacaatgcctataattaaaccagtaaaaaagaacatcgttattacatgatgatgatcgagtaggtaatgaattaaattactaagtacaccaatcgctaaaatcattcctattaatataggaagtaaaaattttagacttggccaaaaccgtttagaaaacaatccactaatggatgaaataaaatcatcataaatccctaaaagtaaagcaatggtacctccactgattcctggaactaaatctgaagtccccatcgcaaatccttttaaaatatttttccatttgaatgtcataaaggtctcctttctttctttattaagttaatacgaatattaccaaattttcaccttacattgaaatattaaatagttaatcatcgttagtatctagttacctattgagaacagatgccttttgattatcagtcgcacttgaaaattgaagtgatttcgaaacaattttgacgaaaatataatcttttttgtcattttaataagtttatattggggactatttacgttataattaagtgtattaaagtgttagaagtctttttgactataaattaaaattactataaactagttaagaaaactttatattttatggagggaatataaatgtcatcaacattggaaattaaagacttacatgtgtctattgaagataaagaaattttaaaaggtgttaatttaacaattaatactggtgaagttcacgcaatcatgggacctaatggtacaggtaaatcaacattatcttctgcaattatgggtcacccaagttatgaagttactcaaggtgaagtattacttgatggcgtaaatattttagaattagaggttgacgaaagagcaaaagcaggtcttttcttagcaatgcaatatccatcagaaattactggtgtaacaaatgcagactttatgcgttcagcgattaatgcaaaacgtgaagaaggtcaagaaattaacttaatgcaatttattaaaaaattagataaacaaatggatttcttagatattgataaagatatggcgcaacgttatttaaatgaaggtttctcaggtggggagaaaaaacgtaatgaaatcttacaattaatgatgttagaacccaaatttgcgattttagatgaaattgactcaggtttagatattgatgcattaaaagtcgtttctaaaggaatcaatgaaatgcgtggtgaagatttcggtgcattaatgattacacactatcaacgtttattaaactatattactcctgataaagtacatgttatgtatggcggtaaagttgtaaaatcaggcggtccagaattagctaaacgtcttgaagaagaaggttatgaatgggttaaagaagaatttggtgcaactgaataggtcattaaataatataaaaactattcataaaaagaactgattgattttaaaatgtggaaataaacagtttatatatcaattcagttactaaaatttttcatcaagtaggaggaaaaagcattatgacaacagaaactttaaatatttctgaagcacaacttgttgattattctaaagcacaaaatgaaccttcttggatgactgaactacgtcaaaaagctttgaaattaacagaaactttagaaatgcctaaaccagataaaacaaaactaaaaaaatgggatttcgatgcatttaaacaacatcatgtagaaagtaaatcatataatgatgtatcagaacttcctgaatcagttaaaaatattattgatatagaaaattctaaaaatttaattattcaacataataatgatttagctttcacacaagtatcagaacaagcaaatcataataatgttattattgaaggtttatcaaaagcgctacaagatcatagtgaattagtagaaaaatatttaatgaaagatgcagttacagtagatgaacatcgattaactgctttgcatacagcattattgaatggtggcgtatttgtatatgtccctaaaaatgtagtagttgaagaccctattcaatatgtagtattacatgacaatgagaatgcaagtttatttaatcatgccattattgtaacggaagaaagtgctgaagtaacatatgttgagaattacctttcaactgcaagtggtgaaggtaatcaagtcaatattatttctgaagtgattgcaggagcaaattcaaacattacttatggttcagttgactatctagataaaggatttacaggtcacattatccgtcgtggtgtgacggcagcagatgcatcaattaattgggctttaggtttaatgaatgagggaagccaaattattgataatactactaacttaattggtgatcgttcaacaagtgaactaaaatcagtcattgttggtactggtgatcaaaaaattaacttaacatctaaaatcgttcaatatggtaaggaaacaaatggttatatcttaaaacatggtgtaatgcgtgaaaatgcttcatctgtatttaacggtattggatatattaagcatggcggtacaaaatctatcgcaaatcaagaatctcgtgtgttaatgctttcagagcatgctcgcggagatgcgaaccctattctacttatcgatgaagatgatgttgaagcaggtcatgcagcttcggttggtcgtgttgacccagaacaactttactacttaatgagccgtggtatttctcaaaaagaagcagaacgtcttgttattcatggtttcttagatccagttgtccgtgaattaccaattgaagatgtgaaacgtcaattacgagaagtcatcgaacttaaagtaaataaatagatcattgagattttcaataaaagaaaggtcgtgaaggtagtggccgaaacttcattaaacatacaagaaattattgaagactttcctatactaaatcaaaaagttaatggaaaacgattagcttatcttgattcaacagcaacaagtcaaacaccagtgcaagtattaaatgtattagatgattattataaacgttacaattctaatgtgcatcgtggtgtgcatactctaggttctttagcaacagatggatatgaaagtgctcgtgagacagtacgacgtttcattaatgctaaatattttgaagaaattatttttactagaggtacgactgcttcaattaatattgttgcacatagttatggagacgctaatattaacgaaggcgacgaaatcgttgtgacagagatggaacatcatgctaatattgtgccttggcaacagctagctaaacgaaaaaaagctactttaaaatttattcctatgactgatgatggtgaactaagaattgaagatgtcaaatcgacaattaatgacaatactaagattgtagctattactcatgtgtctaatgtcttaggtaccattaatgatataaaagcaattgctaagattgcgcatgaacacggtgctattattagtgttgatggagcacaatctgcacctcatatggatatcgatgttcaagatttagatgttgatttctttagctttagcggtcacaaaatgttaggaccgactggtattggtgtattatatggaaaacgtgaactacttcaaaacatggaacctgttgagtatggtggggacatgattgattttgtaagtaagtacgatgcaacatgggctgacttacctactaaatttgaagctggtacaccgattattgctcaagctattggattggctgaagctattcgttatatcgaaaatataggctttgatgccattcatcagcatgaaaaagaattaacagaatatgcatatgagcaattatcttcaattgaaggattagaaatatatggtccccctaaagaaagacgtgcaggtgtgatcacttttaatttagctgatattcatccacatgatgttgctacagcagtagatactgaaggtgtcgctgttagagctggacatcactgtgcgcaaccattaatgaaatggttaaatgtatcatctactgcaagagcaagtttttatatttataatactaaagaagatgttgaccaattagtagaagcattgaaacaaacgaaggagtttttctcatatgagttttaataatttagatcaactttatagatctgtaattatggatcattataagaatcctcgtaataaaggcgttttagataatggatcaatgacagtagatatgaataatcctacttgtggtgatcgcattagactaacatttgatatcgaagatggtatcattcaagaggcgaaattcgaaggtgaaggttgctcaatttcaatgtcaagtgcatcgatgatgactgaagcagttaaaggtcattcattaggtgaagcaatgcaaatgagtcaagaatttactaaaatgatgttaggtgaagattataacatcactgaagatatgggagatgtagaagcattacaaggggtttctcaattcccagcgcgtattaaatgtgcaacgttagcgtggaaagctttagaaaaaggtacagtgcaaaaagaaggtaaagcagaaggtacaactgaagaataaaatacgaataggtaataaatgttattctaagcactatggtgctgtgacattttacacatatttctttttatatagttttcatgttgttacaatgactatagatagtagtgaaagataaatgatgcgtatatcgttttaaatatatttaaggagtgattgaaatggctaaaaaagcacctgatgttggagattataaatatggtttccatgatgaggatgtttccattttcagatcagaacgtggtctaacagagaatattgttagagaaatttctaagatgaaagaggaaccagaatggatgcttaatttccgcttaaaagctttaaaactattctataaaatgccaatgcctcaatggggtggcgatttatcagagttgaattttgatgacattacttattacgttaagccttcagagcatactgaacgttcttgggatgaagtacctgaagaaattaaacgtacatttgataaattaggtataccagaagcagaacaaaaatatttagctggtgtttctgcacaatatgaatcagaagttgtatatcataatatggaaaaagaattagaagaaaaaggaataatctttaaagatacagatagtgctttacgtgaaaatgaagacttatttaaagaatactttgcttctgttgttccagcagctgataataaattcgcagcattaaattcagcagtatggtcaggtggttcattcatctacgtacctaaaaatgttaaattagatacaccattacaagcatacttccgaattaactcagaaaatatgggtcaattcgaacgtacattaattattgctgatgaaggagcttcagtgaactatgttgagggttgtactgcaccagtatatactacaagttcattacactcagcagtagttgaaattattgttcataaagatgcacatgttcgttatactactatccaaaactgggctaacaatgtgtataacttagttactaaacgtacgtttgttcatgaaaatggtaatatggaatgggttgacggtaacttaggttctaagttaacaatgaaataccctaactgtgtattattaggtgaaggtgcgaaaggtagtacattatccatcgcatttgcgggtaaaggtcaagttcaagatgcaggtgctaaaatgattcataaagccccaaatacatcttcaactatcgtatctaaatcaatttctaaaaacggcggtaaagtaatctatcgcggtattgttcactttggacgcaaagccaaaggtgcgcgttcaaatatcgaatgcgatacattaattctagataacgaatcaacttcagacacaattccatacaatgaagtatttaatgataatatttcattagaacatgaagcgaaagtttctaaagtatctgaagaacaactattctatctaatgagtagagggatttctgaagaagaagcaactgagatgattgttatgggattcatcgaaccatttactaaagaattaccaatggaatatgctgtagaaatgaaccgtcttattaaatttgaaatggaaggttcaatcggataatttaagatatagcttaagctaatagttaaaagaactagaatgttaaacattctagttcttttgtttttcaagcaatgattaattatgatggcgatattccaccttatccagtttaaaaccagttaacacaatctattagaagacaagtagttacaaattagctactaatcaaaagtgaacgatttaatagattaattatttttacaaatgaatcagttattaacgcaaacttagggtgttatagtagaaattttaaaataataagaaaatgtaaagttagtatacaacaagtgatatattaattttgaatatggtatcatatatctggtgataaaaatgattaatatcggtttaactggatggggagatcattattctttatatgaagatcttgaaagacaaacagataaattacgtacgtatgcgagtcattttcctgttgttgaacttgatgcctcatattatgctatccaacctgaacgtaatatattgaaatggatcaatgaaacaccagataagtttcagtttatcgttaagattcatcaagcattgacgcttcactcagattataaaacttatgctgattcacgatctgaactatttaaacaatttagacacatgcttgaaccactgattgcacatcataaattagcaatggtacttgtgcaatttccaccttggtttgattgtacagctcaaaatataaattatattttgtatgttcgacaacagctagaagatatccccatgtgtgtagaatttagacatcaatcttggtttaattcccaatttaaagaacaaactttaatgtttttaaccgaacatcaaattattcatgcggtcgtagatgaaccacaaattaaagatgggtctataccgttagtcaatcgtataacttctagtactgcttttgtgcgttatcatggtagaaatcagcatggttggactaaaaaagatatgactgatcaagagtggcgagatgttagatatttatataattataatgaaaatgaattaaaagatttagcaaataaagttcaaatattagaacaaaaagctgaaaaggtctatgttgtttttaataataattctggtggtcatgcagctcaaaatgctaaaacctatcaagatattttagatatagagtatacaggcttagcacctcagcaattaaaatttttctaagaggcgaattataatgtttttaacaatgattttattagttttaattggattattatctgcagtattaggttctttagtaggtattggtggtggtataattatcgtacctactttagtgtatttaggagtgaaccatcatctattacacggcatcactactcagattgcaattggtacgtcatcggttattcttattgtaactggactttcttcatctattggttatttgaaaacaaagcaagtagatattaaaaatggatccatatttttatttggattattacctggttcacttattggttcatttttaagtagatatttaacattaaattcgtttaatttatactttggtatttttatgatctgtgtatctattttattgatgattagatataaaattaaaccatttaaaatattcgataaggaaaagtatcgtaaaacatatatcgatgctaaagggatgacttatcattatagcgttccacctatgtttgctttctttgctacattatttataggtgtacttacaggtttatttggaattggtggtggagcgttgatgactcctttaatgcttatagtatttagatttccacctcatgtagcagtagggacaagtatgatgatgattttcttttcaagtgtaatgagttcaattggtcatattattcaaggtcatgttgcttggtcatattcaattattctaatcatttctagttatattggcgctcaaattggagtaaaaataaatcactcgattaaatcagaaacagtagtattattattacgcacagtaatgttaattatgggtgtatatctaattattaaatcgtttctataataaaacaggaggaatttaagtgaagcttacaatttttcatacaaatgacattcatagtcaccttaatgaatatgcacgtattatgacgtacatggctgaacaccgacctgaacttcaacacccttcactttatttagatattggtgatcatgttgatttatctacaccagtaacagaagcaactatgggcaaaaagaacgttgaacttttaaatgaggctcattgtgatattgctacaattgggaataatgaaggaatgactatttctcatgaagcattaaataatctttacaatgatgcacaatttaaagtcatatgtgctaatgttttagacgaagatggccacttacctcgtcatattgccacttcttatataaaagaaatagaagatgtgcgctttttatttgtagcagcgacggcacctttcacgccattctatcgagcacttgattggattgtgacagacccattagaagccatcaaagacgaaattgaacaacgcaaaggacaatacgatgtattaatagttatgagtcatgtaggtgtcttttttgatgaaaaattatgtcaagaaatcccagagatagatgtgatactaggaagccacacacatcattattttaatcatggtgaagtcaataatggtgtacttatggcagcagcagggaaatatggatattatcttggagaagtgaatttaacgattgaaaataaaaaagtagttactaaagaggctacattacatccagtagacacattaccagtggttaaaacacattttgatgaagaaggaaaagatttgatgaagaaggcgattattaataagccagtttctttatctagtaaaacaaatgtgattacaaaaacgacttatttacttgcagaaagtgtgtatgagtttacaaatgcagattgtacaattattaatgctggattaattgttaatagtgttgagagcgatcaacttactgaatacgatatccatactatgttacctcatccaatcaacttagttcgtgtacgtttgaaaggttctgaattgaaaaaggtaatcttaaaaagtcaaaagcaagaatatatgtatgaacatgtccaaggattaggatttagaggtgatatttttggtggttatatattatataaatgtggatttattcaatcagaacatcgcttctttgtagatggacaagaaatagaagataaccgtacctatatattaggaactgtagatatgtatacatttggaagatatttcccattattaaaaggaacatcgattgattatttaatgcctgaatttttaagagatatctttaaagaaaaattaattcatatgcatcattcttcttagtacacaaatgttcatagttatgtcttaattttataagttattacattttaatttaatgtaaatttcgttataatagttgaagatagattaaacaggagggtatgtgttgttatggctactaaaaatgaagagattttacgtaaaccagattggttgaaaataaagctaaacactaatgaaaactacatcggcctcaagaaaatgatgcgtgagaaaaatttacatacagtttgtgaagaagcaaaatgtccaaatatacatgaatgttggggagctagacgtacggctacatttatgattttaggtgcggtatgtacaagagcttgtcgtttctgtgcagtaaaaactggcttacctaatgaactagatttaaatgaaccagaacgtgttgcagagtctgtagaactaatgaatcttaaacatgttgttatcacagctgttgcacgtgatgatttaagagatgcaggatctaatgtatatgcagaaacggttcgtaaagtacgtgaacgtaatccatatacgacaattgaaattttaccgtcagatatgggtggggattatgaagcacttgaaacactaatggcttcaagacctgatattttaaaccataacattgaaacagtacgtcgtttaactccaagagttcgtgcgcgtgcgacttacgacagaacattagaattcttacgtcgttctaaagagttacaacctgatattccaactaaatcaagtttaatggtaggtttaggtgaaacattggaagaaatttatgaaacaatggatgacttacgtgcaaatgatgttgatattttaacaattggtcaatatttacaaccatcacgtaaacacttaaaagttgaaaagtattatactccattagaatttggtaaattaagaaaaattgcaatggaaaaaggatttaaacattgtgaagctggtccaatggtacgaagttcttatcatgctgatgaacaagtaaatgaagcggcaaaagaaaaacaccgtcttggagaagaacagttacaacaaaaataatattaacccaaaaatttaaaataaactttctgttaagtgatattgcataatgaagtcatattatcttgtgaaacaataatatgagtacataaagtcaattaacaatgtttattaatagatagatgctaaaacttagattgctctttttctttaaaataggcaatctaagtttttattataattacaattaaaggtgacttattatgattaaagttaatcaacagtattttgaattaattgaagattatagagaatgctttgacgaagaattatttgcttcaagatattcagatatacttgataaatatgattttgtagttggagattttggttatgatcaattacgtttaaaaggattttataaagattcaaataaaaaagctgaaatttcaaaacgtttttcaaccattcaagattatattttggaatattgtaattttggttgtccatatttcatagtgagacatattaatgataatgaacgattagaactagatagtgtagatgaagtagaggataaattacatgatgttaaaataaaaccaacaatacaagctacgcaatctactgaaaaaaagaataataaataatgaaaggtcaaaacaatgtatattttgtaaatatcattgttttgacctttcatttattgaataacttgatttagatattcaatgatttcttcgctttcttcttgagacacacctaatatatgagcaatatatccttcttcttcaatatcatctgtgcctatgatgccaaatttattagtttgaagatttaataccagtgttttaccgtaatgacgatcggtctgaataagcattaaatcatagcgactatgttcacctacaaatcctacgaattgtgcttgcgattgttcctcatcatcgtacagaaacatatctatcatatcagtcatgctcctttatttttaatatgtgaaattagtataacgacaaatgatgcatgatgcaaaactatgatatgataataataataagaggtgacagatatgtattttgtagataaagataaattagcacttaaaataaaatatttaaatcagcttattaaggattatgaaacaaataaatcaaatcattatgcatttgaacgtattgcgcaaatgctaattgaatcatcggtagatattggaaatatgattattgacgcttttattttgagagatcctggtaactataaagatgttattgatattttagaacttgaaggggtgatttccaaagatacacagaaccatattaatgatacagttaaaatcagaaaacagtttgcacatcattatacagaattagaagttgaaacacttgtaccattatttgacacctcaataccgtattatcgacaatttgttaaagaagttactcaatttctaaacaaagaaaatgtgccaattaccgcttttggaaaaggagattattcataatgaaaaattataaaggttatttaatcgatttagatggaacaatgtatatgggtacagcagaaattgatggtgctgctcaatttatcgattatttgaacaaaaacgatattcctcatttatatgttactaataactctactaagacgcctgaagaagtaacagaaaagttaaaagaaatgaagattgacgctaaaccagacgaagtagttacttctgctctagctacggcaaattacattgcagaagaaaatagtcaagctagcgtgtatatgctaggaggtaatggtttaagaacagcgttaaccgatgcaggtttaaccgtaaaagaagatgagaatgtagattacgtagttatcggtttagatgaagcagtcacatatgaaaaacttgcaatagctactttagcagtacgtaaaggcgcaaaatttatctctacgaatccagatgtctcaattcctaaagaaagaggcttcttacctggaaatggagctattacaagtgtggttagtgtatctactggacaacagccacaatttatcggtaaaccagaaaccatcatcatgcaaattgctttagatattttgaaactcgataagtctgaagtggctatggtaggagatttatatgatacagatataatgtctggtattaatgtggggatggatacggtacatgtacaaacaggtgtaacatcttatgaagaaattcaaactaaacaaccaaagcccacctattcatttaaagatttgaatgtggctatagctgaattagaaagtaatactaattaataaaaataatttctatgataacttcttattacttaaattgatgatatgagtaataagaagtttttatatctaacagttttgttatgctctgtgtaattgtgatatgtaaccattagtactaatatatagaatatcaaggataagaataaggacatatcggataagatagatacatatttaacactcactaattattatataaaataaatttgatatataattaatatttttatataataaagtgtaaaataaaagtgcgatataatatttcttgatagtaagataactttactaaatataaaataagtagaattgttcttcaaaataaatagcaatgtttgtgaggtgcaatattcaattgaaagaaactaaaaaaataagtgttttttatgaaaaagcaaaaccatatctactgactattctatacttagcaatttttatagctttgtatcttatatatggttcaggcgatacacataataactttatatataacgaattctagtaaggagtcaaaggatgacagatattataaatttaattaatgatattggacaaaaaaatccagatcgagtagctattagacataaatcagatgagttaacgtatcgtcaacttatagaagaatctagtaagctagcacattatttgcaagatacaaataagccattaatcatctatggtcatatgtcaccatatatggtagttggaatgataggagcaatcaaagcaggatgtggctatgtcccaattgatacgtcagttccaatagaacgtgtagaaatgattatgaataaagtagatccaacatttattttaaatacaactgattcaagtgtgaatcaaccaaggaaagaacttacaatcgaagatattaaacattctgattatcctattgtttttgatagtcaaatggataaaacagatgttgtttatactatattcacttctggttctacaggtgagcctaaaggtgtgcaaattgagtatgcgagtttaatagaatttgcagaatggatggtctcattaaatgaaacagataatcatcaggagtggctgaaccaagcaccattttcatttgatttatctgtaatggcaatttatccatgtttaacatctggtggaacacttaacttagtagataaagatatgataaaaaaaccgaagttattaaatgaaatgcttgttcaaacgccaattaatgcttgggtatcaacaccatcatttatagaaatgtgtttattacttcctaaccttaatgaaaaagattatccaagtttaaatcatttcttcttttgtggagaaattttaccgcatagaacagctaaagcacttgttgatagatatccaaatgcaattgtttataacacatatggaccaacggaagcgacagttgcagttactggtgtaaaaatcacacccgagattttagaacgttataacccacttccagtaggtgtagcaagaccgaatactacactatcaacaactgatgaaggtgaacttgttattaaaggaacaagtgtgagtttaggatatctaaaaaacaaagaaaaaactgaagcagtatttaagtttgataatggcgttcgcatttatcacacgggtgataaagctattgaaaaagatggttattggtttatccaaggacgtatcgattttcaaataaagttaaacggttatcgcatggaactagaagaaattgaaacacaactaagacactcaaaatacgttagagaaactgttgttgtgccaatttataaaaatggaaaagttgtttatcttgtaggtgctattgtacctactaaaaaagtggataatgacttagagatgaccagaaacattaaaaatgaattgaaatctcgcttacctgaatatatgattccgagaaaattcgtttggatggaacaacttccattaacatcaaatggaaaacttgatcgtaaacaagttgcagaggatatcgacgcatgattccttatggtacgtttaccttcttcttagtcgcatttatcgttcttttaccagtcatcatactcggatttttaggtaagcgaagctatgtatacaatgggataagtacagtgattatgattgtgattattttctcttcagatacatacaatttatttggacagaaatatttaagtgttcaattaatcagttttgtaatttatttaatatggcaagtgctattaatcatgtggtattacaaatcacgacaaaaaaataatacttttattaaatttttaattattatgattttatctattttacctttagcacttgttaaaatattacaaagttcatggttaggtggacatcaaatacatttccatgaacataagttaattgaatttgtcggattcttaggaatctcatatgttacttttaaaagtgtacaacttataatggaaattagagatggttctattaaagaaattaaagtggggaaattgattcaatttatttcattctttccaacagtatcttcaggacccatcgaccgttataaacgttttgtcaaagacgataaaaaaataccaactggtgagcaatacagaggtatggtagttaaagcgattcatatgattatgatgggcttcttatataaatatattattgctcatttaattaatgtatatgcaattatgccattattaatgcatttacatggttttactcataaatggttatatatgtatgcctatagcttttacttattttttgactttgcaggttatagtttatttgcaatagcagtgagttatctatatggcattaatacaccaccaaactttaaacagccgtttaaagcacgtaacattaaagatttctggaatagatggcatatgtcattatcattctggtttagagactgtgtttatatgagaacattgttctatatgtctagtaaaaaaataatgaagaatcaatttgcaatgtcaaattttgccttcttcttaaatttctttattatgggtgtatggcacggattagaagtattttatattgtatatggtatttatcacggtttaatgtttatcggatatggatattatgaacgctggagaaagaaacatccacctcgctttcaaaatggttttgctacagcattaagtgttattatcacattccattttgtagcatttggcttcttaatattctcaggaaaattaatttaaagggagaaataaatgatggaatttagagaacaagttttagaagtattagctgatgtagcagaaaatgacgtagttaaagaaaacccagatgttgagatttttgaagaaggaattattgattcatttcaaaccgttggattattattagaaattcaaaatagattaggaattgaagtatcaattatggattttgatcgcgatgaatgggcaactcctaataaaattgttgaagctttagaagaattacgatgaaattcaaaccatttttaccaattcttattagtggaatcatatttttagcttttgtattaatgcctgcgagttggtttactggtctcgttaacaataagacacttgctgataatagaacgtcactaactgatcaagtacttaaaggtacgctcattcaaaatcaattatttagtaatgataaatattatccactttatggttcaagtgagttaaataaacgtgatccgtttaatcctgcgatagcaatgcatcatcgaaaaaatacaaagcctgtattcttagttggtacgggcggtaatacagatttaattaatgctattgaattagcgggtcaatatgatcaacttaaaggtaaaaagatgacatttatcatttcaccacaatggtttagtacacatggcgttaatgatatggatatggctgcgcgtacgacaccaaatcaaatcaatcagatatttcaacaaaaggatatgccttcagagttaaaacaacgctatgctaaacgattattaaaatttagaagtgttcctaataaggaatatttaaaagaattagtaaaagatccaagcaacccaaaaggtcgttatatttctaagtttaaagaaagtcaacttcttaaaattgaggcaataaaaacatacttttcattagataaatcaccattaactcatgtacactcacttacatcacccaatgattcttggaaaaacatgagtaataaagcagtgcaacttggtgaaaaacgttctacttctaatagttatggtatccgtaacgaatattggaaaaaactaatgcataaaaagccaatgaatcgtcgccaatatgaatttaaaatgaattcaccagagtttaaggatttatctttactagtagatacaatgcatcaagcaggtgctgatgtacaatatgttattcttccagtaaatggtaaatggtacgatcatttaggtattcaccgttcaacacgtgaacctgtctataaaaaaatacataaaactgttgttggacatggtgggaaagtgtatgatatgtcaaataaagactatgaaaaatatgtattaagtgatgtggtacatgtaggttggaaaggttgggtatacatggatcgtcaaattgaaaaacatatgaacaatcatcaaactcaattctaaatagcaaaaaaaaaagacaccctactctgattaaatactgagggtagggtgtctttaatttatatcgttagaaaacttgttctacttctataacgcctggtacttcttcgtgtaaagcacgttctatacctgcttttaatgtaatagttgagcttgggcatgttccacacgcaccatgtaattgtaattttacgatgccatcttctacatcgactaatgtacaatctcctccgtcacgtaataaaaacggacgtaaacgttcaataacttcggctacttgatcaaacattgttgcattctcagtaggcatgagatatgtctcctttcaagtaaaatacttcataaacttattattaatttattataatagataaagaaagaaaaatctataaaactaaacgggggattaatatatgacaaaagtaagtgttgttgtttacggtgcggatgtagtgtgtgctagttgtgtcaatgcaccaacttctaaaaatacgtatgagtggctaaaaccattattagaaagaaaatatcctaatattcatttcgaatatacatatatcgattttcaaaaagaaactgaaaatttaagtgatcatgatcaacaatatattgagcaaattgaaaatgatgagttgttttacccgcttattacaatgaacgatgaatatgtggctgacggttatattcagtcaaaaaaagtgactcattttatagatcaatatattataaataattaatgcaaagtggagtattcgattttttataaaaatgaggggaagcgtgagatgatgaattgaaattaaattctgtcccgcttcccagttgtgtttatccattatgatatttatatagccataaaacacctgattttaatatatgcgctaaacgtcctgtaactgtacgatccataatataagcaaacccttttttctctcctagagaacctaagaaaccttgaacttttaattcaggcattttttcaggaagtggttcatgattccattgtttttttagtacatcggcaatttgatccccctgtacttctgctaattgagcacttggcgcatgtggtaaagctgcgcaatctccaactacataaacatttttataagtcggtacttgatgatattgattaacgataacgcgaccacttttattagtatcaataggcagtttccttacaatttcaactggttgaatacctgctgtccatactacaatatcaacaggctctggtgtacctccattataaattcttccttgctcaactttatcaatcaaagaattaggaaccacgtttacattattttcgcggaaccacttcgcaatataattacttaatttttctggaaaatttcttaatatacgaggtccacgatcatataaaataatttctaaatctgtgcgactttcacgtagttcacttgctaattcaataccactcaagccagctcctacaattccaacacgcgctcctttaggtaactcgctaatactatgaaacgtttcacgggctttagaaagcgtttgaatactatgagtgtattctttagctcctggaacattatgatatttatcttcacaacctagtccgataatcaactcactataatctactttagtttgtcctaccgaaacaatttggttatctaagtcgatatcacttatttctccataaattgtatttacgcgatgtgaattaggaaaattcattcgcacatcactatcagattttgtgcctgcagcgagcgcatagaattcaggttttaaaccatgaaacggcattcgatctataagagttaatgtgtattcttgaggaagaacatctggaagaatgcgcgacataatacgcatattaccatatcctccaccaagtagaactaaatttttcatattatgttacccctttacattaaaatcaattggctatgtattatgaatgtcagacctttataatttcagattgtataaataaagtataggttcaatattaagtgattcagcctattttaacgcttacttttcatttattgtcccctaacaaataaatgaaagattaatataattttattatatatgtttttaataataacgacaaacgaatgtaaaatgttattgcaaaatacaaatagttaaaaaccatagcaatgcaacatataaagagatttgttataataatgtaattaaattaaaaagaaggtgaagtatgtttccattagtcgaattctgtatatcgaatatggccaaaggcggagactacgtttacgataaacttgaaagtgatcctgaagtagatgtgttagaatatggatgtctcaataattgtggtttatgttcttctgggttatatgcattggtagatggagaagtcgtagaaggggatacacctgaagatttgttaaacaatatttataaacacatagaagaaaatgattttacaaacttattataggagtgattagaaatgccaacagtaacacttactgaagcagcagcttatgaagtaaaagacatgttgaaaagtaatcatatggaaaacggttatttaaaaattaaagtgaatggtggcggatgtacaggtttaacctatggtatgtctgcagaagaagccccaggatcaaatgatgaagtattagaatattatggattaaaagttttagtagataaagatgatgctcccgtactgaatggcactaaaattgattttaaacaatcactaatgggtggtggattccaaatcgacaatccaaatgcaattgcatcatgcggatgtggcagttcttttagaacagcaaaagtagctggacatcctgaaaattgttaagtttcatatttttaagttaatacaatatagtaataataaatttaaataatcgttctgttgttgcttgaaaatatgatataaaaactataaaattggaagtggattaaattttgtcttttttgtgaataaatgttcacaaaaatggatataaaagtgttgactaagactataaatggggatgaacaaataggttaagttcaaagtttttcgaaacaattagtatttttacaatactattgtattataaaaatactacgtttcaacatgttctgaaacttgtagcctttatctacatttaagaaaaaatacgaaagcttaggtgaatgaaatggcacagaatcgtaaaaaagtacttgtattaggtgcaggatatgcaggtttacaagcagttactaaattacaaaaagaagtatctgcaaatgaagcagaaatcactttagttaacaaaaacaaatatcattatgaagcaacttggttacacgaagcgtcagctggtactttaaattatgaagatttaatttatccaattgaaagtgtaattgacaaaaataaagtcaacttcatcaatgcagaagtaactaaaattgatagaaacgctaaaaaagtagaaactactcatggtatttttgaatatgatattttagttgttgctttaggatttgaaagtgaaacattcggtattaacggaatgaaagaacatgcgttccaaattgaaaatattcatactgctcgcgaattatctcgtcatattgaagataaatttgcgaactacgctgcatcaaaagagaaagatgaaaatgatttagcaattttagtaggtggcgctggatttacaggtattgaattcttaggtgaattaacagacagaattcctgaattatgtaataaatatggtgtagatcaaaataaagttaaaattacatgtgttgaagctatgcctaaaattttaccaatgttctcagaaaatcttgtaaattatgtagttaattatttagaagaacgtggcgttgaatttaaaattggtacgccaatcgttgcttgtaatgaaaaaggtttcaaagttaaaacaaatgatcaagaacaacaacttgaagccaatactgcagtgtgggctgctggagttcgcggtagtcaacttatggaagaatcattcgaaggtgtaaaacgtggtcgtatcgtaactaaacaagatttaacaatcgatggtcatgatgatatcttcgttattggtgatgtttctgcgtttatcccagcaggtgaggaacgtccattaccaactacagctcaaattgctatgcaacaaggtgcacatgttgctaaaaacattgaaaatatcttaaatggtcaagctacaactgacttcgaatatattgatcgtggtacagtttgttctttaggttcacatgatggtgtaggtcatgtgtttggtagagacatcactggtaaaaaagctgcgttcatgaagaaagtgattgatacacgtgcagtattcaaaatgggtggcgttggcttagcatttaaaaaaggtaaattctaagttaataaattaaatatttaatcattaaggagtgagacagaaatctgtgaaacaaaatagatttcaatatctcactcctttattttaaaggagagttatatgatacattttaattatgattcgaataaaatgaccgacgttattattctaggagtacccgatcatcttaatcaaattggaaagatcacgtacaaaaatagtgactttacacaaactattgaaaattaccgacatcgtcatattgtaagtagtcaattaggaaaaacatcttcgactattttatacataaataatgaacctaaacgtttaattacggttggactaggaaatttgaaaacattatcttatgcttcatttttaaaagtatttggtacactttttcaatatctaaaaaaagagcgtgtgacagaagcaaatgttctttttgatacatttaattcaaaacaaattgacaaaacaattattgcagagattttcggattacaaagtagacaatcgatttatgaatttaacaactataaatctaacaaatccacaccatatcaactggaattatatatagaatcatctaatagtgatgaagatacaaaaaatataaaagcagggtatttgattggtgaatcggtgaatatagcacgtgactttagtaatatgcctcccaatatacttactccagaatattttgcaagtgaagtagcacatcactttaaatcgtcttctgtttcagtagatattaaaaataatgacacattgttatcagaaggttttggtttactacatgctgtaggtaaaggatccactcactctcctgttgttattactttaacgtatcatggaacagatgaaaatgaagcgcctattgcattagttgggaaagggattacatatgattctggtggttatagcatcaaatctaaaatgggtatgcaaacaatgaaatttgatatgtgtggtgctgctaacgttgtaggaatgattgatgctgcgtctaaattatctttaccagtaaatattgtaggtgtcattgtctctgcagaaaatatgattagtcaacaggctatgaaaccagatgatgtatatactgccttaagtggtgaaacagtagaagttttaaatagcgatgctgaaggccgtttagttttaggagatggcgtattttatgcaaatcaatttcaaccacgtttaatatgtgattttgctactcttacaggtgctgctatagcggcattaggagaagataaggctgctttatttagttcgaatgcagatgaagatatgaaacacattttaaaaagtgctagagaagttgatgaattcgcttttgaattacctattactcaaactgaacaacaattgattcgtaatacagaggtcgctgatttagtgaatcatacaaatggacaaggtaaagccttatttgctgcagctttcgttacgcattttagtgagcaaacgccacatattcattttgatattgcaggtcctgcaacgattaataaaaataactataaaggtcctaaaggtccgacaggaagcatgataatgaccattgtgaattggttaagacaatcaatataaaatggatgttagaaatgaatatacattcattgtgaggcaaaatagataaatgtctgaggtacattgataccttagacgtttattttttaaaaatactattatattaggcgttgacaaccgcctaactacttgatattattaatcacataattatacactttagttcggtagagtgataaaggatgtgagtataatgtttaatgctgtagttattgccgtaatattaatgattatattatgtctcttaagactgaatgttatcattagtttatttattagttcacttgtaggtggtctaatatcgggcatgagtttaaacaaagtaattagtgtattcggtaaaaatattgtagatggttcggaagtggcattaagttacgctttattaggaggctttgcagcactgatatcatatagtggcatcacagattatttagtaaataaaattattcgtgcgattcatactgagaatagccgcttatcaaggattaaagtaaaagtgattattattttagtattactagcaatgagtattatgagtcagaacttaattccagtacatattgcatttataccaattgtaattccaccattacttagtctatttaacgatttgaaaattgatagacgattaattggtttagttataggatttggtttatgttggccatatgttttactaccttatggctttggacagattttccaccaaattatacaaagtggatttcaaaaagctcatcatcctatcgaatttaatatgatttggaaagcaatgttaattccttcacttggttatattgtcggtttagtgattgggttgtttgtttatcgtaaaccacgtgaatataagcaagaggtacttaaagataatgaagaagaaatagcagaaattcggccatatgtattagttgttacgattgttgctattttcgctactttcttagttcaaacatttacggattcaatgatttttggagcattagctggagtgctgatattctttatttctggtatttataaatggaatgaattagatagtcaatttgtagaaggaataaaaataatgtcatttattggtgtcgttattttatcagctaacggttttgctggtgtcatgaatgctactggtgatattgaaaaattagtttctagtttaactgagattacaaatggacataaattaattactattattgcaatgtatattgtcggccttattgttacgttaggcattggatcatcttttgctacgattccaattattgcagctttatttataccactaggttcatctcttggtttagataatatggcattaattgctttagtaggaacagctgctgcacttggagattctggttcaccagcaagtgattcaacacttggacccacagcaggtcttaatgtagatggtcaacatgatcacattagagatacatgtatacctaacttccttttctataatgttccattgatgatttttggtacaatagctgcaatggtattatagaaaaaaagaggtgacaacatgtctaatttacttgaaacatttgatatgaaaatcgaaacagtagatgagggaatagttgtaatttccatgccagtcactgataaggttaaacaaccctttggctatctacatggtggtgcaagtattgcattaggtgaaacagcttgttcattaggcgctgcccatttaattaatacgaaacactttatcccattaggtttagaaatgaatgccaatcatattcactcagtaaaagagggacgcgtgattgctaccgcttctattattcataaaggtcatacgacacaagtatggaatatagaaattaaaagtgatcaagataaattaattagtatcatgagaggtacaataggaattaaaccattaaaataacaaactatacaatactagcccgtagaaaatattcatctacgggctagtattttatatttatgatacttctctatggtgatttattctttgaaatacgctataaattctttgaactgcttctttacctcccatgatatttctagcaaatggactaagttctaaatcagctagtccatcagcaacaaataaatgaggtaaccattctaattcatgtgtgatttttggaaatccacaagataggaggggggcattagcattttgaattagagattgtatcatgggttgctgcaaagttgaagacttaaatccagttgctaaaagtatgtaatcatatgggatatttaaattttcagtaataatttgatgcgattttaagtccttaatctcttctttatgtataataagtcttttattttgaacatatttctttaagcgtaaatataactcgtgaggcattgaacctttatgtctttcttttaatactgtttgaagtttttcttcatgtgaagaatgatttaaaaaggccttcatttttttgggacctagccaaccaggatcagcatcaaaatgttgaatatctatatttttattcatccataaatgaacgattttattcttatctaattttaaaacctttaatgttaaatgagcagctgaaataccacttccaatgacatgagatgattgtgaaaataattgagaattaaaatgatcactaaatatatgacatacatctttagcttgagtaaatgcggcagggacaaaaggttcattatgacatccttgtgctaaaacaacacaatcagtttgaatgacagaatgatgacttgttgtaatactccatcctctttgatttttttcaatgcgttgaacataactttgaatataactttgatttagatggtagttatgtatttgagcatgtgtgtgatccataaacatctctgtttgagatctttgataacgaccaaaagttggattaatatactaattcatttttgcaaatttttttaaatgaaatgggtcaggatgaatatgatgtacaataggtgaacgtaagtaaggcatagcaattctatttgtgcatttatgaaattgttcgcataaagaatcatgagggtcgataattgtaagattttggatggacatgcctacttcacgtaacttaattgctatagtggttccttgtataccgccaccaataatagtccaatgcttaataaaactcctttaaaacgtaattattacgatttacaacaacataaaactatctttttcaaaacaaaaaatcgaagcactttaagaaagtacctcgatttttatcaaattatattttcttattgttaaattcatctttaagttcatcaatttttgtatctttagtataaggcgttttattattatatgatgctttcatcattaaatggctagaaagagggccagtaatcaaaatgaaaataatgccgaatatcagttgcatattggcgtatccttctgttcccataaaatataaaaacgttccaaataataaaaatatagcacctaatgttgcagatttacctgcagcatgaccgcgtgaatagacatcttttaaacgaataataccaatagcagtaattgcacttatcaatgcacctaagataatgaaaatgatggctaaactaatgatgatttttgctatcacgttcaatcaccttacctttatctataaatttagagaatactgctgtacctaagaaagctaaaataccaataagtaaaataactacaagtaagtattgtgagccgataaatacactatataatgcaacacacgccatcaattgtaagccaatagcgtctagtgcaaggacgcgatcaggtaaagtgggacctttaataatacgaataaacattgctagcatcgataatactacgacaattaaagcaataataataattgtttttaccattaagcttcgcccacctctctcactactttttcaagtgatgatttaatgctttcaatttcttcttctttcgtactaaagttaattgagtgaatgtatattttagttctatcatcactaatacctaaaacgacagttcctggtgttaaagtgattaaattagataataaaacaatttgccaatcatgttttaaatctgtgtgataaataaagaaaccaggttgatttttaagtcttggctgtaacacaattttggatacatcaatattggctttcattaattctataaaaaagacaacaatcaatttaatgactttataaactctttttaaataaaaactaccaggcaatacttttttaaataagtaaacaagcccaattcctattaaaaatcctagtaaaaagttattaaatgtataactgccacttaaaaacatccatataatagctaatataatatttaacacaaattgaagagccattagtatctacctcctaatacacttttaatataaacattaggatcatagaaagatttagctgcttctgatataaatggataaagtgcatcagcagataaaccaaatagtacagtaatgacaacggcaattactgaaacgattgttgcttgttttacatttactttgttattcagtttatatcccttaggttcaccaaagaaaccatgtaggaaaatacgaatcacagaatagagtacgattaaacttgaaagtaatacgataattgcactgatataaaatcctttttcaaaagcggcttttacaataaagtattttccataaaacccactaaatgggggaataccagccaagcttaaagctgcaataaagaaagaccaaccaagtataggatatgtcttaattaaaccaccgaatgacttaagatttgatgttttggtaatttgatacatgacaccaataattaagaaaagtgcagtcttaactaacatatcgtgaatggtataatatatagcacccataattcctaatttactcatcatagcaacaccaacgagtatgacacctactgcaatcataatattatataaaataatttttttaatatcataataagcaatggcaccaatggatccaaatataatcgttaatagtgctaagaataaaatagtatagtgagaaaaactcattgtgttatggaaaaaaagactaagtgttcttaaaatggcatagacgccaactttagttaataaagcaccgaagaatgcaatgatagcaaaaggtggcgcatagtatgatccaggtaaccaaacatataatggaaaaacaccagctttagttgcaaacacaaagatgaacaaaataaagacaatacttaataatccttgatgtgaatgagataattcattcagttttacgctaatgtcagccatatttaaagtgccgacgattgaatataagatagcaacagcaataacgaaaaatgtcgatgttacaacattaataagtaaatatttgaccgtttcttgaagttgaatacgtgtaccacctaatacaagcaatgcataagatgacattaaaaagacttcaaagaatacgaaaaggttaaaaatatctccagtagtgaaagcaccaataatacccactaacataaagacgattgaaaaatgaaaatagtaacgctctctatcgattccggcagttgaaaaagaatagatcgtaatgagcagagtaatgataatactcgttacaatcaacattgcccctaacgtatctaataaaaagataataccatatggggctggccaagaacctaattctactttaagaggaccaaatttactaacattaattaaattaatcatcgctacaatcaaagttaaaactaaacctatcaatgtgaccgcacgctttaatggatagcgttgacccaaaaagataagaataatagcggtaatgattggtataactaatgtaagaacaaccatattagttgctatcatcactaggcactcctttcatttgttctatgttgtctgtgcctaattctttatacgttctaaaagctaagactaagaaaaaagcagtagttgcaaatgcaataacaattgcagtaagtattaatgcatgagggattggatctacatagtgatgaatatctttttcatatattggcatttcaccatgtttcaatcctcccatagtaattaaaaataaatttgatgcatgtgtaatcagcgttgttcccataataatacgtattaaacttttagataaaacgagatagacactgattgatgtaagtatgccacatacaataatcataataatttccactattcgttctctccaatcgttataataatagtcattactgtaccaattactgcacacataacgccaaagtcgaagaacattggtgtattcatatgaacagagtgtagaagtggtaatggaatattaaattctgtatgtgtaaagaaactttttccgtaaaaccaacttgctataggcgtacttacacagaataataaaccaataccaattaagattttaaaatcccaaggaaagattttacgcatcgtttttatatcaaatgcaatcataataatggttaaagcggttgatagaagcaatccaccaacaaatcctccacctggtgtgtaatgtcctgctaaaaataaagtaataccaaaaagagcaattaagaaagcaataattacagctgaatactgaaatattaaattgttattttgtctattcattgctttccacctcacttgttttgttacgtttacttcgtaatttaatcatcgtgtaaactgcaagacctgcaatacctaatacagaagattcaaataaggtatccataccacggaagtctacgagaataacgttaaccatatttttaccatgtgctaagtcataaacatgtgccttgtaatattctccaatagaagaaaaatgtctattaccataagcgataagacctaatattgtcactaccaaaccaacaccaatagagatgatagcattcgttaatttaaatgatgttttttcattatagcgatttaagttaggcaagtgatagaaacataatagaaatagacccgttgagatagactcaacaacaaattgtgttaaagctaaatcaggtgccttaaagaaaacaaataaaattgatactgcatagccaacaacactaagcataataatactaaataaacgagatgttgctgtaacaactaagaacgctgagatagtaagtattatgataataatcatttcatagatgtgaattgtatttatatttttaaaattaaagctaaacggtaccctcactaatgtgatgagtgttaacacaattaatgtaccaaaaataaagactaaactatcccgtacatacccattaacataataattagttagagaagcggaatgatttggtaaccatttgccagtagtatcataccaataatttaattttaagttgtctggttgtgcttttaataaacgaatccaataattgaacgtaaataataagataatacctacaatccaaatcgttaaagtagagatgaacgcaggagtaataccatggaacatatggaattctgcatgtacggttgatattccacttatggctttagtagctggttcgattatagaatgtgttaatagtccagggaatagtccgaaaacaacaactagcgttgctagaattgctggtgaaattaacattaataatgatgcttcatgtgctttcttaggtaataaatcagaatgatatttaccaaagaatacatgtagtacgaatttaattgaatatacaaatgtaaatatactacctacaatcgctaaaattggaaaaacaatacctagagtatttaaactaaatagaggcgtgtgtgtagcttctatcatagcctctaagaatttttcttttgataagaaaccattaaatggtggcacacctgccatacttaatgctgtaattacagtaagagtaaaagaaattggcatgatagtaagtaaaccgcccaatttttttacatcacgtgtgcctgtcacatgatcaatggcacctgtaatcataaataatgcacctttaaaggtagcatggttaattaaatggaaagcagctgctgtaaaaccagcgatatataattgactgtcactaccttcaaaatgataacttatagctccaatacctagcatagacataatcattcccaattgtgaaactgtagaaaatgctagaatccctttcaaatcttgttgtttcgttgcatttaatgaagcccaaaatagtgtgattaagcctactaaagtaatagtccatatccatccttctgatatcgcgaataatggggttaaacgtgcaacaagatataaccctgctttaaccattgtagctgaatgtaaatatgcactgacaggagtaggtgcctccattgcatcaggtaaccaaatgtaaaatggcacttgtgcagattttgtgaaagctgctaacataattaaaaccattgcaagtgtaaagaaagaactgtcttgtatttgagatacatgatggattaaataatgtagacttaatgattgtcctgcaagtgaaattaagattaatccaccaagtagactaagtcctccaaatacagtgataatcagtgacttttgtgctccatatatagaagctttcttttctctccaaaaagaaatgagtaaaaaacttgagaatgaagttaattcccagaatagatataagataatgatattatctgagagtacgacgcctaacattgcacccataaacagtaataaataacagtaaaaattccctaatcgttcagatttatctaaataaccgattgaataaagaactactaaacttccaatgccagttataagcaaactaaagagtatgcttaagccatcaagataaatatcaaaattcatgccgatatgtggcatccaattgaaagtttttattactgtattacctgattgagtagttgaaatataagataaaaaataaataaataagacaacaggaacaggtaatacaaaccatcctaaatgaatctttttaaagaaacgataaaggattggaataatgagtgcgaatattaacggtaaaagtaccgcaatatgtatcaaactcactatattttcctccttcaaaaattgttataaattttattatacatgaatcaatttattctgaaaaactgtgaaaagatgtaaagtcagcaattttacttatcttgttaaataggaagaaagacgtaaaatggactagaaaaaattttgtttatattggatagaatagtctttttttagactgtttaaattgtctaatgccaattttgcgtattctgtgtgttgttgttttaattcgttttccattttagtaatcgcttgttgtaaagaatcttcatatttcatctcttctacattaaaatctctcaattgtgaacgtgttgcataacgtttttcataatggcttaaagcacgtctttcatgaaaaaaaacaccttcagtttcaccaggatgatgtaaatctccttgtttaggatgtttaatgacttgttcaatttgtactaaaacttgatgatcgctatcttctttaatcgttacaccataagtacctgttttgtgagagaatcgatataacatgctatattacttcctttcaaatatgttaatatgtatctatatcatcataacatgaatggagaatttaaatgactaactatccacagttaaataaagaaatacaagataatgaaattaaagtaattatgcatacaaataaaggagatatgacatttaagctgtttcctgagattgctccaaaaacagttgaaaattttgtgacacatgcaaaaaatggatattatgacggcattacattccatcgtgtcattaatgattttatgattcaaggtggagaccctactgctactggtatgggaggagaaagtatttatggaggttcatttgaggatgagttttcattagaagcatttaatttatatggtgctctttcaatggcaaatgctggtccaaatacaaatggttcacaattctttgttgttcaaatgaaagaagtaccagatacaatgcttaatcagcttgttgatggcggttggcctgaaccaattgctaaagcttatgcagaaaaaggtggaacaccttggttagatcaaaaacatactgtgtttggtcaattaattgacggtgaaactacattagaagatattgcaaatactaaagtaggggcacaagataagcctgtacatgatgtggttattgaatctattgatgtagaagataaaaaagcttaattcatcaaagaaatatcattaaataaaaaaaggtgagcgtaaactgttttaaataagacatttatgctcatctttttttattaaaaacgaactttttaatgtaaatttatgaagaagaaatataaatttctaaagaaattaattttttattagtttatcgttagtccaagtatgggatttatgctattattaatatgttaagaaaaacgaaataaggggttatcaagttgaatactcactataaagaaggtcagcatattaaagtgcgtgtgactggaattcaaccgtatggcgcttttgttgagacccctgaccatactgaaggacttatccatatttcagagattatggatgattatgtccataatctaaaaaaatttctatcagaaggtcaaattgtaaaagctaaaatcctttctatagacgatgaaggaaagcttaatttgtcacttaaagataatgattactttaagaattatgaacgaaaaaaagaaaaacagtctgtattagatgaaattaaagagacagaaaagtatgggtttcaaacgcttgaagaacgcctaccggtctggattaagcagtctaaacgtgcaattcgtaataataattgaatgactgtcaacacgctaaaacgttacttttttaagtaacgttttttattatgtcaatatattgctaaatttaaaaagatggttaatgcatataagcataaaagtagagacataaaaatgttcatgttatagtttgaaaataataaaactaaaagatttagaaaggaattacttatgaataataaatataaaaaattatttgaaactgttacattacccaacggtgtatcattaagaaatcgctttgtacttgcccctttaacacatacatcatcaaatgatgatggtaccatttcagatgtcgaaatttcttacattgagaaacgtgccaaagatgtaggtcttgcaattaatgctgcgagtaatgtaaatgatattggtaaagccttcccaggccaaccatctgtcgcacacgattcagatatcgaaggtttaaaacgcttagcgacagcaatgaagaaaaatggcgcaaaagcattagtccaaattcatcatggtggtgcacaagctttacctgaattgactcctaatggagatgttgtggcaccaagtcccgtttcaatgaaaagttttggtcaacaacaggaacatcatgcaagagaaatcactactgaagaaatcgaacaaacaattaaagatttcggtgaagctacacgtcgcgccattgaagctggatttgacggcgtagaaatacatggagcgaaccattacttaattcatcaattcttctctccatactataatcgtcgtgaagatgaatggggagaccatttaaaattcccacttgcagtgattgatgaagtattaaaagttaaagaaacttatgcaaataaagattttattgtaggttatagattatcaccagaagaagcagaatcacctggtatttcgatggaacacacagaaaaattaattaaaacaattacaaaaaaagcgattgattatgttcatatttcaattatggatattcattcacaaacacgtgagggtaaatatgaaggagaagaacgtctaaaacttatccatcaatgggtagatggacgtatgccagtcattggtataggttctgtatttactgctgatgatgctttagatgcagtagaatcgacaggcattgaactcgtagcattaggtcgtggaattcttctagattataactttatccataaaattgaagagggtaaagaagaggaaattatctcatactttgatccaaatcgtgaagataaacatgcgttaccaccaaatttatgggaacaatttaataaaggattttatccgttacctcgtaaagataaataattaacaaaatatgaaatagtatggtagtgagacagaactcataatgaattttgtccactacctttttttattaagaaaaaaaggtttatattaaaattttagctaatagaaataatttacttgtaaaatgataagaggatatgtcattatctttgtaagggctttcataaatagatttagagagactttaatgttttaaaatagaattgcgaaagccagtaaatatagtgattagttttaatataacaataagcaaaggggagatattatgactaaatctgaaaaaattattgaactaacaaaccattacggtgctcataactatgtgccgctaccaattgttgtttcagaagcagaggggatttgggttactgatccagaaggtaataaatatatagatatgttatcagcatattcagcagttaaccaaggtcatcgtcatccaaaaattattcaagcattaaaacatcaagcagataaagtgacacttgtctctcgtgcttttcatagtgataacttaggggaatggtacgaaaaaatttgtaaattagctggtaaagataaagcactaccaatgaatacaggtgctgaagcagttgaaacagccttaaaagctgcacgtcgttgggcctatgacgttaaaggtattgaaccaaatcaagctgagattattgcatttaatgggaacttccatggtcgtacaatggcccctgtgtctttatcatctgaagctgaatatcaacgtggatatggtcctttattagatggttttcgtaaagttgactttggcaatgaaacacaattaaaagaagcaattaataaaaacacagcagctgttttagttgaacctattcaaggcgaagcaggcattaatattcctccagaaggttatttgaaaaccattagagatttatgtaatgaacataatattttgtttatcgccgatgaaattcaagctggattaggacgatctggaaaattatttgcatgtgattgggataatgttaaaccggatgtatatattttgggtaaagcgcttggtggaggcgtcttaccaatttcagttgtattagcagataacgaggtgcttgatgtatttacacctggttctcatggttctacttttggtggcaatccgcttgcttgtgcagtgtcaattgcggctttagatgtcattatcgatgaaaatttaccagaacattcaaatgaactaggtgaatattttaaatcagaattacaaaagattaatcaccctgcaattaaagaagttcgtggacgcgggttattcattggtgtggaattacacgaaagtgcaagaccattttgtgaagcattgaaagaaaaaggtttattatgtaaagaaacccatgatacagtaattcgttttgcaccacctttggttattactaaagaagaattagatgaagcattaaatcgaattagaagtgtatttaagtaaatagatatgacgtaatatggcatgatttaatttctttaaaaagtataggcgtgttacaatacttatgaaagcgaaaacatttgtgaaaaaaaagaggcgaaagtgattatgactgagaataataatttagtgacttctacacaaagcatcattaaagaagcattgcataaattgggatttgatgatggtatgtatgatttaattaaagaaccattaagattcttgcaagtacgtattccagtacgtatggacgatggtacagttaaaacatttactgggtatcgtgcacaacataatgacgctgtgggtcctactaaaggtggcgttcgtttccatcctgatgtagatgaagaagaagtcaaagctttatcgatgtggatgactttaaaatgtggcattgtcaacttaccttatggtggaggtaaaggtggtattgtatgtgatccacgtcaaatgagtattcatgaagtagaacgtttatcacgaggatatgtacgtgcaatttctcaatttgtaggaccaactaaagatattcctgctccagatgtgtttacaaattctcaaattatggcttggatgatggatgaatatagtgctttagataagtttaattctccaggttttattactggtaagccaattgtcttaggtggctcacaaggacgtgatcgttctactgctcttggcgtagtgattgctattgaacaagctgctaagcgtagaggaaaagaaattaaagggtcacgtattgtgattcaaggctttgggaacgctggaagtttcttagctaaatttttaaatgatatgggtgctaaagtagttggtatttcagacgcatatggtgcattacatgatcctaatggcttagatatcgattacttactagatcgtcgtgatagctttggtactgtaactaacttatttgaagatacaatttcaaataaagaattattcgaacttgattgtgatattttagtaccggctgcaatttcaaatcaaatcacagaagataatgcacacgatattaaagctgatattgttgtagaagcggcaaatggaccaaccactccagaagctacacgtattttaactgaacgtggcgttttactcgtacccgatgtattagcaagtgcaggtggcgtgacagtatcttattttgaatgggtacaaaacaaccaaggttattactggtcagaagatgaagtcaatgaaaaattacgggaaaaattaatcgaggcttttgatactatttatgaattagctcagaatagaaaaattgatatgagattggcagcttatattgtaggaattaaacgtaccgctgaagcagcacgctatcgtggatgggcgtaaatataactattaaaaatgaacctcccaatgatgagaaatatatactcgttattgggaggttttttatagagtgatttaattaataaaattactcgtttgggatagtagctttatatttatcagcaaaatttgtaaatagaccgtcaacaccatattgatttaaacgttgcatatctgtagttttatctactgtataaggatgaattaggaaacctaaatcttttaaatgcttagtgttttcagcgtttaaactagtataatctgggccgacacctatggcatatgagagaatatgttgtaaatctgcttcactttgttgttgcaattcatttttatcaagtaatcgaatcaatggtactcgtgaatctaattgatgcattttttgtaaactttcttctgagaaagactgaattaatatatgtccatgatttaaagagttaccagttaacatgtgatgtttttttaatgtttcaagtagttgttcttccatacctggatatacattaggatttttagtttcaatataataattagcctttgtaccgtatcgagataaaatttcatctagagtagggactttagcatttttatattctggtttcgcatattcagggtgagcattgttaaaccatgacccagcatctagttgtttaagttgtgcgagtgtatagtcttcgacacgacctgtaccgtttgttgtacgatcaacggtttcgtcatgcattgctacaagttgtccatctttcgtacgttgtaagtctaattcaatatacgacgcccctaactcattatgacttttatcatatgcatgaaacgtatgttccggcgcatagccacttgcacctctatgagcgatagtcgtaaaacgttcgccagttaagttggtcatccaattcgaatgatcttgattacgatgtttactaatcgctactgacgtatatttattttgtgattgattaaactgttgatgttctgcagcggaattagaagtagtgctatagttgttatgattattatttgcttctactggattatgtaatgttactaaaccgatagtggctattgctaaactagatatcattgcttttttagaaaccttcaaaaaattcatcctctcagttcaatttaaaaatacattaaaactttagcaaagagaagaaatttttagaataattttttcaaaattttagcaaaactattaatttattaacaataaatatagagaaagttaaaataattaaattaaatttaactaaaaaatgagtcttgccaatttactttatatttatatgtaattttacattgaaatacttaaaaaaataaggcactttcgtataatttaataaacatcactaaactaaattaacgaagtgccttatgtataaagattctaacatgacttaacttactctacgaaaggaaacttcagtacttattcttacaagtgatgtgatcttcacaaaatcaaaaactttcttataaaacgattaagcgatttagagttaatcctcaagtagatgctttattagaatctttatttattcgattcatagtcatttaataatagtattcattattgttttaaaatattttctgcaacgtttaattgatgacgcacagcatcttggcctgtagaaccataactttttcttctatttaaacaattttctggttttaagtaatcatatacatcttcttcgattttatcatttaattcttgataatgttcaaatggtacatctaataaatagatgccttgttgaatacattcaaagacaacttttcctacaatttcatgtgctgttctaaacggtacattcttatctactaaataatctgcaagttctgttgcattagagaaatcttgatgcactgtttcatttaaacgatttgtattaactgttaacgtattaagcatgccttcaaaaatacgtaatgaacctttaatcgtacgaactgaatcaaataaaccttctttatcctcttgtaagtctttattatatgcaagaggcaatcctttcagtgtgacaagcatactcattaaatgtcctgtcgtgcgtcccactttaccacgaatgagttcagccatatctggatttttcttttgaggcataatagatgaaccagtagaaaatgcatcggatagtgtaataaatttcgcttcatccgtagaccaaaaaataatttcttccgcaaaacgtgataggtgagtcattgttaatgatatattatgcaatgtttcaataatgtaatcacgatcactcactgcatcaagactattttcataaatatattcaaaaccaagtagttcttgagttttatgtctatcgataggatgtgtagtgccactcaatgctgcagcgccaagtggagatatatcaatacgttttaaactatctgcaaaacgtgtatagtctctttctaacatccaaaaatatgtcatgatgtgatgtgcgaaagaaataggttgagcacgttgtaagtgcgtataacctggcatgatcgtgtctacatgagattttgctaaagttaaaatagactcttggaatgaacgaatgagtgcttgaatctcaatgacttgtttttttacatagagatgtaagtctgttgctacttgatcatttctactacgacctgtgtgtaatttgccacctggatctccaatgcgttgtatcagttcatgttcgatatttaaatgtatatcttctaaagcatgtttaaattcaatattatggttatgaaaatctgcttgtatatctttcaaaccttttacaatggcatttttttcttcttcagaaataatgttttggtgtgcaagcattgttgcatgtgcaatactaccttgaatatcctcatctaaaagcgtttggtcaaagtcaatagaagcattaaactcatctacccactcttcaggttgttgttgaaaacgacctccccatgctttattactcattactataacctccatgtaaataagcatttacttgtgttggtagtccataaatatcgataaagccgactgcagctgattgatcaaaagcatcttctttagtataagttgctaacttttcatcataaagtgtataaggcgattttctaccattaacaatagcattacctttaaataatttaactctgacatctccttcaacatattgttgagtgctatcaatgaattgctttagactgtctgttaaaggtgagaaccataaaccattatatgtttgttcagcaaattgtttttcaatgaccggtttaaaatgcgctacatctttagttaatgttaatgtttctaaagatttatgagcttttaatatcacttcagcacctggcgtttcatatacttcacgtgattttataccaactaaacgattctctacgtgatcgatacgtccgataccatgtttaccagctaaatcatttaatgttagaattagctgatctaaatcatagtctttatggttaagttgaacaggaacaccatttttaaatgataagataatttcatctggtgtatctggtgtatcctctaattcagcagttaaatcatatgcatctttcggtggagcagcatagggatcttctaaaataccacattcatttgcacgaccccataaattttgatcgattgaataaggtgaatcatgattaatacttacaggaataccatgtttgattgcatagtcgatttcttcttcacgactccagccccactctctaacaggagcaaatgttttcaaattagggttaagtgctttaattgctacttcaaaacgtacttgatcattacctttaccagtacaaccatgtgcaataccgattgactttgtttgttcagcaatttctactaatttcttcgctattaacggtcttgagagcgcagatactaaagggtaactattttcatacattaaatttccttttattgcataacttacataatcttcactaaattccttagttgcatcaataatatgacattcgatggcgcccatgtctaatgctttagaataaacaacatctaaatctttaccttcgccaacatctaaacatactgccactacgtcatatcctttatctataagccatttaacggctacactagtatctaatccacctgaataagctaaaacaattttatctttcatattgtcacctcaaagttttctgaaaattgatataattctatactaacagatttattatgaaaataaaaccatttttttacatatttatacaaaataaagataattagaatatcattaatcatctattgttatttctatatttattgaatattactacaactaaggagtttattgctgtttcgattgtgtattcattacaaggtaaggtaattcaatgattctaaaaaaaacagactattttttgaataattgaacttgttcattgaatagataacttaaagttagtaaaatgaaactaattcataaacattggaggatttataaatgactcatattcaattagattatggaaaaacgttagaattttttggtcaacatgaacttgatcaacaaaaagatattgtaaaaacaattcataaaacgattcatgaaggtacaggtgctggaagcgactttttaggttgggtaaatttacctgaagattatgataaagaagagttttctagaattcaaaaagcagcaaaacatattcaatcgaattcagatgtattggtagttatcggaattggcggttcatatttaggtgcacgtgctgcaattgaaatgcttacttcatctttccgtaacagtacagaatatcctgagattgtatttgtaggaaatcacttatcttcaagttatacacaagaattagtgaattacttgtctgataaagacttttcagtaaatgttatttctaaatcaggaacaacgactgagcctgctgtagcatttagattgtttaaacaattagttgaagaaaaatatggtaaagacgaagcaaaaaaacgtatttttgctacaactgataaagcaaaaggtgcattgaaacaattagcagataatgaaagttatgaaacatttgttgtacctgatgatgtaggtggtcgttattcagtattaactgcagtaggattattaccaattgcaactgcaggtattgatattgaagcaattatgaatggggcaaataaagctcgtaaagaactatcatctgaaaatttagaagagaatattgcatatcaatatgcaacaattcgaaatgttctttatagtaaaggttatacaactgaaatgttaattaactacgaaccatctatgcagtactttaatgaatggtggaaacagttatacggtgaatctgaaggtaaagactttaaaggtatttatccttcaagcgcaaactatactactgatttacattcattaggtcagtacgttcaagaaggacgccgtttcttatttgaaactgttgtaaaagtaaatcaacctaaacatgatattacaattgaaaaagatgatgacgatttagatggcttaaattatttagctggaaaaacaatcgatgaagttaatacaaaagcatttgaaggtacgttattagctcatactgatggtggcgttcctaatatcgttgtgaatatcccacgtttagatgaagaaacattcggttatgttgtttacttctttgaattagcttgtgcgatgagtggctatcaattaggtgttaatccatttaaccaacctggtgtagaagcttataaacaaaatatgtttgctttacttggtaaaccaggttatgaagataagaaaaaagaattagaagaacgtttataatatcaacataaatttaaataaaatgatagtttaaagcctaggacatgatgagctgtcttaggcgttttttatatattggcagtcaatgactcaattgaatatatacttatatcaatctttttcaacatactagactttcataaaaagaagtttttgtttaacgtaatatggggtcaagagaaggaaactgaattcgttttgaattcagtctcactctcttttaaatgattaatatgactaatgttaaatctgttatctagtacttgtgactgatttcttattgaattaatagtttttttaagaaaagagtgtaaaataattttatactcaatagagaatgatgaaatttcaagaaaggatttgatgatatagtgtttcatcaaattgaacattggtttaatgtgttacaacaattaggatactttgcaggttttattattctctatttaagagctatgattcctgtttttcctttaactctatatgtcatcttaaatgttcatgcttatggttttattacaggaaccattattagttggttagggatcgtcgctgggacatttactgtattttatttttttaggaaattcgttgatgcatcttttatgcaaagagttaaagcaaaaaaaggtgtgaaaaaacttacacattttatagataaacaaggacttgttcctatttttatattaatgtgttttccatttacacctaatacagtagtaaactttgtagctagtttttctcatattaaaatgaagaattattttattattttattattttcaaagtttatttccatctcatttttagcagtgatgggtagagaagtgactacatttttaacccatcctataagagcaattattttaattattgttactatagtcatatggtttattggaaaaagagttgaaaaacattttatgggaacacatgaggagtgacattttgcgtcgaattataagtacgagtatctccattattttagcaattatttttgtgatatttatccaaaattttttactaagaagtgcaattgttcatactaatgagatggcccccactctaaataaaaatgattatataatgattaataaattgaaagtgacatttaatttattaaatgaaggcgatattattatgtatcgtcatcatgatcaaattcattttagccgtattattgggaaagcaggcgaatcggtagaaataaggcatggtaaattatataaagatgatagacaagtgaataaatattatgctaaaaatagagatattaatgatttcgcattacgagatttagaaaatactgatggggatattattccacctgactcatttttagtgttgaatgataatagtaatacattaactgattcgagaaaatatggattaattaaaaaaagtgatgttataggaaatgtatatctaaggtattatccttttagatcattcaactatgagtttaataaatagatgaggtgttatatttgaaaaaagaaataacagaatggattgttgcgatagctgtaggcttattgcttgtatggcttgtagtcacttttgttgccaaatcctatacaataaaaggcgactctatggatccaacattaaaagatggacaacatgtaatggttaacattttaggttataaggtaggaaacataaaaaaaggaaatgttattgttttccatgctaataaatctgatgactatgttaaaagagtgataggcgtaccaggagatagtgtgacatataaaaaagatcagctatatgttaatggaaaaaaagtaaatgagccttacttagactataatgaaaaacataaacaaggagagtacattacaggatcttttgaaactaaggatcttcttaatgctcatcctaagtctaacgttattcctaaaaataaatacttagtgctaggagataatcgtgaagttagtaaagatagtagagcgtttggattaatagataaacaacaaatcgtcggtaaagtatcatttagattttggccactaaatgattttaaatttaattttaatccagataagtaggatatcaatttaaaaatgaaagtagaatgtcaattcaggtgaattcacattctacttttattttatctactttactttttaagaacgtatgttccgtggtaaaatgagtttaaaggagtgtgtagataatggaattaaatacatatcttggaagagctggtaccggtaaatcgtatcatatgattaaaaatattaaacaacaaatgaaagaaaatcctcttggagatcctatcattttgattgcacctacccaaagtacgtttcaattggagcaatctttcgtaaatgatcgagagttaaacgggagtttaagaacggaagttttacattttgaacgtttgagctatagaatctttcaagaactcggaggattaactgaaacacgtttaactaaagcagctattgaaatgatgatattcaatatcgttcaacaacacaaatcagaaatgaaattatatcaatctcaagcagattattatggttttagtgaaaaattaagtgaacaaatccaagattttaagaaatattctgtaacacctcatcaacttgattcatttttagaagataatgaattacaaacaagaacccgacataaactagaagatatttcgcttatttatcattattttgaagaacgattaaatggagaatttattaccgctgaagacagtcttaattattttattgaaataatgcacaaatctgagtggattaagcatgctgatatttatatagatggattttataacttttcaacacttgaatatcaaattattaaagcattagtacaaaatgctaaacaagttactatattattaactacagatggtaatgaagatcactttagtatgtttagaaaaccttctgacgtacttattcacttaaaagaaattgcaaatgaattacatatacctttaaatgaacattattttacaacaccatatcgtttcaaaaataaagatttattacaattagaacaacaatttgacgcacttcaagttaatccaactcaatcacatggttatattgatttacttgagtcatcgaatatgagagaagaagttaatgaaatagcacgacgtattattaaagatacacgtgataaacactttagatatcaagatattgcaattttatatagagatgaaacatatgcttatctatttgaatctattttgccacaatacgatattccttataatattgatactaaaaaatcgatgacacatcatcctataatggaaatgatacgttctttattagaagttatccaaagtaatatggggcttagtccaatgatgagactatttaaaaccaatattttatctcatcaatttaaaaatagtagttacttaattgatctattagaaaactttgtcattgaacgaggtatttacggtaaaaaatggttagatgataaattgtttaatatcggtaattttacaaaaatgggacgtaaagagcatcaattaactgaagaagaaaaagaagcatttgaagacgtcatacgcttaaaggatgatgttgtaaataaaatacttcgttttgagcaagccatgcttcactctaaaaatgttagagattatgcaactgcattttatgaaacaatggaagcttttgatttacctaaatatttaatggctcaccgtgatgaactagatttaaaaggggaccatgagaaagcagaagaaattgaccaattatggaatggattaatacaaatactagatgatttagtcacagtatttgaagaagaagaaatgagtttaaatcgattcttagaagtatttgacattggacttgaacaactcgaatttgtaatgattcctcaaacattggatcaagtgagcatagggactatggatttagcaaaagttgataataaaaaacacgtttatatggttgggatgaatgatggagtgatgccacagtccatgtcatcttcaagtttaatcactgatgaagaaaaacgtttgttagaggaacagggaagtgttgaattaagtccaacctctgatatcttacaaatggatgaagcatttgtatgctacattgctatgacacgtgcatgtgaacaaatgactttttcatatagtcttatggggatgcaaggagatgaaaaagagaaaagtccatttttaaatcagattcaagcattgttcagtaatttggatatccaaaatattcattatctgcatcatgcttatcctcttacattaatggaacatccacatcaaactaaaattcatttatttgaagcattgaaatcgtggttggaagaagaagcggtagcagatacgtggcttgatgcttataaagttataagtgaaaatgaagaattaaatgacagtataaactatttatcaacagcattaacatatgataatgaaaccattcaactcacaccacaattgtcagaagcattatatggaacgtctattaatgctagtgtttcacgatttgaaggttataatgattgcccgttccaacattatgctacttacggtcttcgtttaaatgaacgtaccaaatatcaacttgaaagttttgatttaggtaatatttttcataatgctttaaaatatatttcggataaagtaaacggagaatttagtcaactggataatcagaaaatccatgcacttacagaagaagctctacaacatgttttaccacaagtgcaatttaatttaatggattccaatgcatattatcgttatgtatctaaacgtataggtgtcattgttgaaagtactttaaaggcacttcgttatcaaaatgagaatacaaaatttagaccaaaacgttttgaaactgcttttagaaagaaaccaagaactgaagaagaattgattgcacatcccttaatgacgacacaagggattccgattcatattcgtggacaaattgatcgtatcgatacttatacaaaaaataatacaagttttgtaaatattattgattataaatcatctaatcatagcgccaatttaaatttgaaaaaagtttattatggtaaacagatgcaaatgatgacgtatatggatatcgtattacaaaattcagagcgacttggtttaagttcagaggttaaaccaggtggattgttatatttccacattcatgatgaacgtttaaaatttgaaaaatggggcgatttaactgaagaggcattaaataagaaaaatattaatcaagctattctaaaagaatataaattaaaaggattaatcaatagtgatgctgaagttatcgatgctatggatataagacttaacgagatatctaaatcagatattgtacctgtgacattgaaaaaagatggaagtattagtgcacggggaagccaagttgctgatgaaacaacgattcataaatttattcaacacaataaaaataattttattgagactgcttcaaatattatggatggtcatacagaagtagctccacttaaatttgaagacaaattaccatgtgaattttgtagtttccagtcagtatgtcacgtagatagccttattgatagtaaacattatcgccatgtagatgaatcgattaatccaattcaagcaattcaagaggtcgaattagaaagcggtgaggacaatgaataatattccgataaaacctaaagacgcacaatggacggatgcacaatggaacagtatatatgcaaaaggacaagatatactagttgcagcagctgctggctcaggaaaaacagctgttctagttgaacgtattattcaaaaaatcttaagagatgaagtagatgttgataaattacttgtagtaacatttacgaacttaagtgctagagagatgaaacatcgtgtagaacaacgtattcaacaagcttcattagaggatcctaagaatgaacacttaaaaagtcaacgtataaaaatacatcaagctcaaatttctacactgcatagtttttgtttaaaggtgattcaacaacattatgatgttatccaactagaccctaattttagaacgattagtgaagtagaaaacgtacttttattggagcaatcaattgatgaagtactagaacatcattatgaaaatcctgatattgaatttttgactttagtcgaacaactatcaaatgatagaaatgacgatggatttagagaaatgttaaagcgattttattattttagtatagctaatccttcaccatttaaatggttagattcattagttgatccttacgagaatgatgagaagcaacaagactaccttaaagaattaaaaatacttgcagaaatatatatgaaagcagcatttgactcacttcttgaagcagaaaatcttttatcctattgtaatgctgttgaaaaacatttagaagttgtccaaagagagaaaatgatatgtcaaagcatattagaagatggtgttttgaatagagatgcacttcttaattatacacctgaaaaatttccacaaatgtcatcaaaaataaaaaaagaaaatgaagatttagagacacttgaagatattaaatctttctataaagaatataatgaaaccattcaagatgtaaaaaataaatatttaatgcggtcagtagatgaacttaaagacgatatgaaacagttagcgcctcggataaaatatttagttcaaatcattaaagatatcattaatgattttgctaagaaaaaacgtagtagaaatgtactagactttgcagattatgaacattttgccttacaaatattaacagatgaaaacgggatgccttctactatcgctaaagattatcgtcatcaatttgaagaaatacttattgatgaatatcaagataccaatcaggtacaagaggcaattatatctactatcaaacgtggtgatgaattagatggcaacttatttatggtgggagacgtaaagcaatctatttataagtttagacaagcggatcctacattgtttatgagtaaatatcatcgattcactaaagaagggcaacaaacgggacttcgaattgacttatctaataacttccgctcaagaaaggaagtactttcaacgactaattatctttttgatcatatgatggatgaagcggttggagaaattaattatgatgccgatgcgcgtttatatttcggcgctcattattatccagaaaaaccaatgccactcgaattacatgcgctgattaaatctgaaaatgaggacacagacttagatagacaggaacaagaagcatattatgtagttgaacaagtaaagcatatccttgataataaactcgtttacgatgcgaaaaacaatgcctatcgtaaagcaacttataaagatattgttattttagaacgtggaatgagtaatgctagacgtttgcaaaaagtatttaaagataataatattccgttccatgttaatagtaaggaaggttattttgaacaaacggaagtacgactagtactatcgtttcttagaacgattgataacccattgcaagatatttatctagttgggttaatgcgctctgttatttatcaatttactgaagatgaacttgctgaaattcgagtagtcagttcaaatgatgattacttttatcaatcaattttacactatataaaatatgatcaagctaacacacaattagttgataaattacgtcgttttattgaagatatacatttatatcaagattatgggcaaacacatcctgtgtatcagttaattgataagttctataatgatcattatgtcattcaatattttagcggactgattggtggtaaaggcagacgtgctaatctttttggattgtttaataaagcaatagaatttgaaaactctacgtttagaggactttatcaatttataagatttatcgatgaattgatagagcgtaaaaaagattttggtgaagaaaatgtgataggacctaatgataatgtagttcgaatgatgacaattcatagcagtaaaggtttagagtttccatatgttatttattctggtctttctaagaattttaataaagaagatattcggaaacctttggtattaaatcaaaaatatggtttaggaatggagtactatgatttaacagataatatttcttatccatcactttcatctgtagttgttaaatcgttaacagaaaaagaattgatttctgaagagatgcgtttaatgtatgtggcattaactcgtgcaaaagaacagctcattctaattggaacggtagataaagaagaaaagttaagaaagtatgaacgtttgcctatttcaaatcaactcattgcacttcataaaagattatcagtagaacgaccttttaatctggtatatagtattttagcgaaacacttatctcaatctatcacatccgattatcaatttgagacatctatcaatcaattagatgacagtttgaaaccatatgtagatttgaaaatcattcattttgatgaattatctttaataagtgattcaaatgagacattacatcgaactatcaatgatattgaagaagaggctccgaataataaagaaaacgaacaacaaatgattcatcaattaacgtttaagtatccatttataaaaaatactcaaaagccatcaaaacaatctgtatctgaattaaaacgtcaattagaaactaaagaagatggaacaagttacgatagagtaagacaatatcgcattggtgcttatacttatgaacgtcctaaattcttaagacaagaaagaaaacgtaaagctaatgaaattggtacattgatgcataccgttatgcagcatcttccatttagagaacaacgattaactgaaatagagttagatgactatattcatatgttaattgatcaacacattattgaagaagacgctaaaaaagatatccaatttgaaagaattatggaatttattcgtagtgacttatatatgaaaattgcacaagctgatgaagtatacagagagctaccatttgtagttaatcaagcacgtgtagatgaaataccagatttagatgaagatgtctccattatccaaggtatgattgatttgatttttattaaagataatcaatattattttgtagattacaaaacagatgcttttaatcgaagaagagggctgacggatcaagagattggaatacaattacgtgataagtataaaattcaaatgaaatattacaaaaacaccttagaaacaatactaaataaaagagtgaacggctatttatatttcttccaattcggtgagatgagcattgaagatgctttataatatcaatcttattttagaaaagatgcgtcaaatttctaaaatttcagacatatatatttgttatttattaataattaaagttataatatgaaataagatatagatgaggagttgataatgaatgaaatttttatcattcaaatacaataacgctgaatcatatggcgttaaagtaaagcgtgaagacgctgtatgggatttaaaacaaatttttgctgaatttggtgaaggagacttccatccacaaacgttacttgaaggtttacaacaaaaccaaacacttgatttccaagaacaagtacgtaaagcaatagtagctgttgaaaatagtggaaaagcagatcagtataaattctcatttaatgatattgaatttttacctcctgtaacaccaccgaataatgttattgcttttggtcgtaactataaagatcatgcctctgagttaaatcatgaagtgcaacgtttatatgtgttcactaaagcagcttcttctttaactggtgataacgcaacaattccaaatcataaagatattacagatcagttagattacgaaggtgaattaggaattgtgatcggtaaatatggcgaaaagattcctaaaggcttagcattagattatgtctatggctatactatcattaatgatattacagaccgcactgctcaaaatgcacaagatcaagcattcttatctaaaagtttaacaggtggttgcccaatgggaccatatattgttactaaagatgaattacctactccagaaaatgttaatattgtcactaaagtgaataatgaaattcgccaagatggaaacactagtcaaatgattaataaaattgatgacttaattcaagaaatttctaaatatgttgctttacatcctggtgatatcattgcaaccggtactccagcgggtgtaggagctggattacaaccaccaaaattcttacaaccaggtgatgaagttaaagtaactattgataacattggtactttgacaacttatattgccaaataataatgctagttatgtttaaaagaggctgggacataattcctaacaaaatagccagtaaatgagtttattataaattcatttactggcttctttatttacaatactacgtattgttggctcgctttcttaggggacagcttcagcctgtatttaatgtgaataataatcattcaaaattaaatactctaccttatacaggtgaaaatgaaaactcattattatctttagctgagttcacattattaagtggtctgctattattattaaaacgaagaaaaaaagaagataaataataaaaaataaattcagttatcttcgtattcaaaatatgaaataaaaaacactccaaaagttataattttacttaacttttggagtgttttttatttttaagtatatataaattgtctagcttcgtttccagcgacgtggccggtaactaaagcacttgtaatattgtagccgcctgtatacccatgaatgtctaatacttctccacataaaaataaaccaggttgaatttttgacatcattgttttaggccatatttctttaagagaaacgccaccacccgtaacaaatgctctttcaattgaaagggtaccattaacagtgaaaatgaattgtttgaaatgttctgcgaggtgagtcaactgttgatttgaaagatgatgaaatgttgtattttcattaatattagcctgttctagcataaacaataaatatctttcttctattaaaccacgcagtgcattttttatatatttgtctggttcttcgcttaagattttctttattttattttctaaatcttgtaaagaaatctctggaaatacatctaattgtaattgtatgtcttgttttttctgatttttttgttctttataaacgaattggctacaacgtaatgcagctggtccacttacaccaaagtgtgtaaaaatcatatccatttgatgactaatacgttttttaccatttttctttaaaactgataattctacattttttaaacttaagcctttaagtgttttatttttaataaaagattcactagatgtaataggaacttcagtagggaataattcagtaatagtgtggcctagatttttagcaaatctgtagccatcacctgtggatccagtttgggggacgcttgttccaccagtcgcaataataactgtttttgattcaaattcgccatcttgtgtttttactataaaagattgatcatttttagaaatatcattaacaacagtttcttctttaatttcaacgttgttattcttaattgtattaactaaagtatcaacaatatcttgtgatttgtttgaaactggaaacattcttccatgatcttcttcttttaattttataccacgactttcaaaaaattctattatggattcgttatcaaattttgaaaatggactatataaaaatttaccgtttccgggtatatttttgatgatttcttcataaggtagacgattagtcacattacatctaccaccaccagaaatttttaattttcttccaagaccttttttcttttcgattaatagaaccttactactattttcactcgcagcaactgctgccattaatccgcttggtccaccgccaatgattattgtttgatacatatattaacctccgttatcatacatttatattctacataaatacttattattttgcgaaccgaagtagaattttgcgttaaaaagtgtattaaatacataaataaaaaacttacaatatttttatttaataatagtgagaataattgacaaaaaaaacttaaaaagaaacgagaaacaataagtattttgtgatatattttatagtaatgcaagtccttagtttagacagatgtataacgacatagtttgattaaattaaagataggaagattgaatatgagtgaaaataaggaaatggtgcgcggaacctttttaataacatttagtattttaattactaaaattctaggtgttttatttgtaattcctttttatgcgattatgggtgcaaatgcggaggaaaagttagcgccatttaactatgcttatgttccttataatattgctattgctgtcgcgacagctggagtgcctttagcagcttcaaaatttgtagcaaagtataatgcaataggagcatatagagttggacagaaactctataaatcgagttttatcgtaatgtcgatatcaggtattataggatttttaatattgttttatttagcccctgatattgcaggtattactttaggtcaaaaagaaggaaaaggtggatggacagtaccagagattacttggattattcgtatcatcagtatagtagtggtttttatcccactattagcaacatggagaggggtattccaaggttatcaatcgatgggtccaactgctgtatctgaagttactgaacaattagccagaattatatttatattaataggtagttatttagttttaaatgtttttcatggtacatatctacaagctaatggtgtagctacattcgcagccgctgtgggagcaattgcaggtttatttactctttggtattactggaaaaaacgtaaacctcacattcaaaaaatggtagagtctgatcgtacaggattagacatttcttatggaagaatgtataaagaaattattgcatacagtattccgtttgtaattgttagtttaaactttccattatttaaccttgttgatcaatttacacataacaatgcactagatgcagcaggattccatgcaaataaagattatttctttacgatattaaactttacaaccaataaaattgtaatgattccaacatcacttgcagcaggttttgcggtaagtttaataccatatattactaaaacatatgcagaaggtcgtttaactgaaatgcatcgtcaaattaaaacatcaatcggtgtattaatgtatattacagttccagcaagtttagggataatggcactggctgcacctttatatacagttttctatcaatataatccagatggaaacaaaatgttatttatctatgcccctgtagcaatattaatttctttacttagtgttactgcttcgatgttacaaggtatagacaaacaaaaattgacagtgtttgtcattttaggagccgttgtattaaagttagcacttaatattccattaattatgactttccatactgcaggagcaattttaagtactgctattgcattgagttttgcgattacagcaaatttctttattttaaaaatatatgcgaaatatgaatttacagaaacatttgtgcaagtagcgaaaatttttatttatagtttaatcatgatgattagtgtagaaattgtttacttaattttaggtcattttgtccctgtagaacgtaaatttggagcaatgattatattatttgttggggttattatcggtgcattagtgtatggcggtatcacaattaaaaatcgattagctgatcaatttcttggtgaattaccagcaaagattagacgtaaagttggattcttaagatgaggttagataaatttttatcgaatatgggagttggcacgcgtactgaggtaaagcagcttttaaagaaaaatagtgtcaaagttaatgataaagtggaaaaatcgcctaaatcccaagtgaatcctgagcaagatgaaattactgtagatggcaaaataatagagtatattaatcatgtttatattatgttaaataagcccaaaggatatgtttctgctacttatgatgatataaatcaaacagtgatagatcttattgatgattaccgtcatcttgatatatttccagtaggcagactagataaagatactgaaggtttattacttattactaatgatggacaatttaaccataatttaatgagtccatctaaacatgtgtctaaaacgtataaagtaacctctaaatatcctattaaaaacgaagatattattgcttttaaaaatggaattgaactatcagatggcaaagtaaaaccagcacaacttgaaaaactagatcataaattatctttagttactatttatgaaggaaagtatcatcaagtgaaaagaatgtttcattcaattgataatgaggtattagaattaaaacgtcttaaaatttctaatttgacgttagatgaaaacttaaaatctggagagtatcgtttactaacttcagaagaattaaaacttttatagtaataaaagagaaaaggggtaatatgatggctaaaagtgcaggtttattaagaattgtggcaggaattggtgctgcagcggctgcagtagcattatcacgtgaaagtagcagaaataaattaaaagctgagtataataaatataaagaaaatccagaaggctataaacaaaatgcgaaagggctagttaatgatattagctcaaaagcaaatgaaacaattcaaaacgtaaagaatgacccacaaggttatgcaaatcgtttaaaaaatgatcctaaatctttattacaagatgaaaaatctaaattcactaatgtgaatactaaaaaaaatgatacacatgaattagcagaaggtaaatttgatgatgaaggtggcgcaactgttaataataatttaagagtagtcactgaagaagatttgaaaaacaatcataatgccttagacgatagacattaaacttaaattttaaagaagtgagaaaattttttctcacttctttttttatatgtactatgaaattttctgacatcttgttgtcatttaatactagatttatgtaaaataataggtatatctattgaaaaggaagttgatctctaatgtggaaagaaaaagtacaagaatatgaaagtcaaattattgaagatttaaatggattactttcaatcaagagtgtgagagatgatagtcaagcttcagaggaagcaccagttggctctggacctcgtgaagctcttgattatatgtataaaatcgctcaaagagatggtttttctacccatgatgttgatcatattgctggaagaattgaagcaggtcaaggtgaagatgtattgggaattttatgtcatgtagatgtcgttcctgctggagacggttgggattctgatccatttaaacctgttgtaacagatgatgctattgtggcaagaggtacacttgatgataaaggtccaactatcgcagcttactatgcagttaaaattttaaatgaaatgaatgtagattggaaaaaacgtattcatattattattggtacagatgaagaatctgactggaaatgtacagaaagatatttcaaaacagaagaaatgcctgctttaggttttgcaccagatgctgaattccctgctattcatggtgaaaaaggaattacaacatttgatttagtccaaaatgtaagctcacatcatactgatcattcagaagcaaaacttctttcatttgaatctggtcaacgctataacatggttcctgatcatgctaaagcacatattttggttgaaaaaaatatgacagacgtagttcaacatttcgaacattatctagaccaacgtcaactagaaggtgaagcggttgtagataatggtgaattgatattaactgttgaagggaaagccgtccatggtatggatccttcacttggtgtgaatgctggtttatatcttattgacttcctatcaactttgaatcttaatcaagctgcaaaagaattcgctgaatttagtaatcgttatttacatgaatctcattttggtgaaaaaatgggtatgaagttccatactgatgttatgggagacgtgacaacaaacgtaggtatcattacgtatgataaagaaaaaggtggcaaatttggtatcaatttacgttatcctaaaggcttcgaatttgaaactgctttagaacgttttaaaaatgaaatcaaatctcaagggtttgaaatagaattaggtaaagttcaacaacctcatttcgtagataaaaatgatccatttgtacaaaaacttgtcactgcttttagaaatcaaacaggtgatatgacagaaccttatacaattggtggaggcacttatgcacgtaatttagacaaaggtgttgcatttggagctatgtttgaagattcagaggatttaatgcatcaaaagaatgaatatattactaaaaaacaattattcaacgcaacaagtatctatttagaagcaatttattcactatgtgtggagggataaataatgacaaaagtatttattaacggagaatttttaaatcaagaagacgcaaaagtttcttatgaagaccgaggttatgtatttggagatggtatatatgaatatattcgtgcatacaacggtaaattatttacagtaactgaacactttgaaaggttccttagaagtgcgagtgaaattcaaatcgatttaggctatactgtcgaggagctaacagatattgtaagacaacttttaaaaatcaatgacattcaaaatggtggaatttatattcaagcgacaagaggtgtagcaccaagaaaccattctttcccaactccagaagttaaacctgctattatggcatttgctaaaagttatgatcgtccatatgacgactttgaaaatggcattaatgctgtaacagttgaagatattagatggttacgttgtgacattaaaagtttaaatttattaggaaatgttcttgctaaagaatatgcagttaaatataatgcaacagaagccattcaacatagagatgaaactgttactgaaggtgcgtcaagtaatgtgtatgcgattaaagatggcgaaatctatacacatcccgttaataattacattttaaatggtattactcgaaaagtaattaaatgggttgctgaagatgacaacataccatttaatgaagaaacatttacagttgatttcttaaaaaatgcagatgaagtcattgtgtctagtacttctgctgaagtaacacctgtcgttaagattgatggcgaaattgtaaatgatggtaaagtaggtccaattactaaaaaattacaagaaggattcgaaaagtatattgaatcaaaaagtatcaattaactttaaatttcttcaacgatgatgtatatgatatgttataatatttataaagcattcgggattttagctttttcatactagtaaaatgtatcattttgtttctcattttcagttgaaaaattaagctaaaaattataaaatcatcattgagtgattaaagagataacgtaaaaaatttaaatgatttgaagacatttaaataataattttatcaatataacaaaaacaaagttagaaatataatcgttagataaaaagcgatgattaaattagatatatggctcttgaaaaactatatttctcgagccattttctagttgaaagtgaggtgaacgagttggagcagttttatcaattagggtggacgcttgattctgcaggtggagcatctggagaagcgtatatggctgaacaagatggacaaaaattatttcttaagcgtaactcaaatccatttattgcagctttatctgcagaaggtattgtgcctaagttagtttggacaaaacgtattgaaacaggcgaagtggtaacagcacaacattggaaaaatggtagagaacttacaccatctgaaatgtctcaaagaagagttgctgaacttctcaaaaaaatacatggttcaaaaccactacttaatatgttaaaacgtatggaaatggagcctattaccccaaatattatgttaaagaaaattaatgcttctttatctagagacgtattaacccatcatattattcgaaaagcattaacttacttggaagatcatattcctaatttagattcacgtttctttacagtagttcatggtgatgttaatcataataactggttactttctgatcgtgatgagttatttttagtagattgggaaggtgcaatgattgctgatccagccatcgatattggtatgctgctatacaactacgttccaaaacaacaatggtctaactggttcaatacttatggtgttaaagaaagtatggacttaaataaacgtatgaaatggtatactgtgattcaatcaatcggcatgattcaatggtatgaagaacaaaaaagatttaaagatatgaacacatggctcaaatttttaaatgaggtaatgaatagtaatttatttatttaaggagatttaatacatgagagtccgttataaaccatgggcagaagattatttgaaagaacatcctgacctagtagacatggatggttcacatgctggcaaaatgagtgattggtttgataagaaacagccaatctatattgaaatcggttcaggaatggggcaatttataactacacttgcagagcaacatcctgaaattaattttgtttctttagaacgtgaaaaaagcgttatgtataaagtgcttgataaagtaaaggataaaggactcacaaatttaaaaatgatttgcaatgatgcaattgaactaaatgagtactttaaagagaatgaagtatctagaatttatttaaatttctcggatccttggccaaaaaaaagacatgcaaaacgtcgtttaacgtatcgcacttttttagctctatatgaacaaattcttaaagaagatggagaaatacactttaaaacagataatagaggtttatttgcttatagtcttgaaagcatgtcacaatatggaatgtattttacaaagttaaatttaaatcttcatgatgaagatgatgaagataatatattaactgaatatgagaaaaaattttctgataaaggttcccgtatttatagaatggaagccaaatttcataaaaattaataaataatatattaaatccaacacacgagcgtaagaagcaaatacattcttacgctcgtgtgttgttttatcatttattgctctttatgataaatataagtacatatgataaacatccatgcaatatataagagaaaaagaaaaaatttagtccatatttcatctaaaatgattattgatttttgtattatcatagtaatcgttactttactgttaagttcgaaaatgataaaaaattaataaaaacatcaaacaaatgtaatttaaaatataaatatgaagtgaaaaaagtattaaaatattttttaaatatcaaaaaataatattaattttcttcaatagtaagtatttcacctgtgtgtgcatcagcatagaaggtatactctatatcacggttgtttttattttgagtaataccaccttgataaacaaaacgatttaaatattgctctttattttgcaaaggttcatgaagaatgtaagaacctttaatatccataaaatatgattttacttcctctaatattctatccggattttttacttttttgtttttcaatgtatgatagagtataaaagccgtagatgctcctatagttattacgatgggaatggagatatattttatagtttgacgagtcataattatcgaatctaacctttctattaatagttcttattattagtttaccataatcaaaatgatataataaatttaaggagtgtgtttatgtaatggaaaacgataaaactttacttcgtataaaaacattaacagaattacatggagcaccaggctttgaagaagaagtacgtgactacatgaaaaaagaaatgaccccatttgtagatgaagtgataactactcatttgggaagtgtttttggtataaaaaaatcaaaaaaacaaaatgcaaagcgtgtgatggtagcggctcatatggatgaaattggctttatgattacgaacatcactcaaaatggcatgttacagtttactaacttaggcggtgtatctaatgatatatggcaaggacaacgactgcaggttaaaaatagaaatggtgaaaaaattgtaggcgtagtttcgaatataccaaaacattttagaacaggtaatgaagcggttcctgagattaaagatttaatgttagatataggagcagaaagtgataaagaagttcgatcacgtggaatagaaataggggacacaattgttccttttacaccattcactcaattatctgaacatcgatatagtgctaaggcatgggataatcgttacggttgtgtcttagcaattgaaatattagaattactcaaagatgtagaattagatgtagatttatatgtgggtgcaaacgtccaagaagaagttggattaagaggtgcgaaagcatcaactgaattaatacaaccagatatagcattcgttgtagattgttctcctgcaaatgatattaaaggtaagcagcaattatctggtcaattaggtgaaggaacattaattcgaattaaagatggtacgatgattctctctccacgtttcagagactatctactggagttagttgatacatttgatattcgttcacaatattatatttcaccaggtggtacagatgggggagaaatccataaagcaaataaaggtgtacctacagcagttataggtgtatgtgcacgatatattcatagtacagatgcggtatttgatattagagattattatgctgcgcgtgaattattaaaacaagctgtgagtcacttaacaaatgaaaacattttaacattacaatttcaaagtgaggagaaataatatgattacattagaaactgaaaaacaatttgaagaattaaaaaatgaacaaacggtatttgaatttacagctggatggtgtccagattgtaaagtgattgaaccagatttaccgaaattagaaaaaaaatactctaattttaaatttgtatcaatagatcgagataaatttatagatttagcaattgaaaatgatatcatgggtattccaagctttctcgtatataaaaatggtgaattaatgggaagttatattggaaaagaacgaaaatcaatcgaacaaatagattcatttttaagtcaatatgtgtaaatgagtaattaggacttaaattttcttatctatatgaaagaatagcctaatttttctgtaattgaagctctttttattgtaaaatattgtaaggtgcgaaaataggagtgttttaatatgaacgtctttcaaatgagagatacattaaaacaacgtttaaagcatttagacgttgattttaagtttgatcgtgaagaagaaacattacgtatatatagacgagataattttaaaggcgtaactatcaagcttaatgcaattgtagcaaagtatgaagaacaaaaagagaaaatcattgatgaaattatctattatgttgaagaggccattgcgcaaatggatgataatggtctatctaaaatgaaagatattcaagttatgcctgtaataagatcaactagttttgataaaaaaactaaagaaggtcatcaatttgttattgaagaacatactgcagaaactaatatttattatgcacttgatttaggaaaatcgtaccgattaattgatgaaagtatgttaaaaacactaggtttaacttcacaacaaattaaagaaatgtcgttgtttaatatacgtaaacttgagaataaatataaaacagatgaagtaaaaggaaatattttttattttatcaattcaaatgacggatatgatgcgagtcgtattttaaatacaaaatttttaaatgaaattgaagctcaatgtgaaggtgaaatgttagtcgctgttcctcatcaagatgtattaattattgctgatatacgcaataaaacaggctatgacgttatggcacacttgacgatggaattttttactaagggacttgtacctataacgtcactttcatttggttataaaaaagaacatttagagccgatttttattttaggaaaaaataataagcaaaaaagagatccaaacgttattcaacgtttagaagcgaatcgtaaaaaatttaataaaaaataactaataatacgtcaaaaggagaatttaaatgaatttattttataataaagaaggcgtaggggacgttgcatttttacaaattgaaccaacagatggaccttttgaatatgaaataaaaaataatgtggttgctattaaacatgaaaatcaaattgttggatttaatattttcgatttttcaaaagtatattcagttaatagtaatggtcatattaaattaaatgaaacgcttgtagaagctatacagcaatcaattacaaatgcaggttttgattatcaacttgaagcggatttatcacctaaatttgttgtaggctatgtagaaactaaagaaaagcatcctaatgcagataaattaagtattttgaaagttgatgttagtagtgaaaaactacaaatcgtgtgcggtgcgccaaatgtagaagcaggtcaaaaagttgtcgtagctaaagtcggtgcagttatgccaagtggcatggtaattaaagatgctgaattacgtggtgtggcatcaagtggtatgatttgttcaatgagagaattgaacttgcctaatgcacctcaagaaaaaggaatcatggtattgtctgacgattataaagtaggcaatgcattttttgattaaaaaactaggaaggatgtggaagtatgagttggtttgatgaattatttggcaatgataaacattctgatgaagaattactaagacgaaaaaataaacgtcgacataactcagaaacacaaaagaatggtgagcataccttacttcctgaaaatgatgatatctatgatcgtccgcgtggaaaatttcgttttcctattgatttagggcaagatgctgaaacatatgatgaagcggtttacagagaagttgatgaagatgaatatatgtcgcagaaatcatctaaaagtgataaagaatttggttatggcgcttatagttatgatgaaatagataataatgactatcctcaaacttatgatagtgcaacagatactcgaagacgcagaagaagacagtatacaaatcatgatgatactggagtgccttcaattaaagaaagaccttctaataaacgtaataagtcgttgaatagtgcacaattaaatgaaaacaataatagaaaaacgacttctcaatatcataagtatacaaataatcattctcatgtgaaattacaatcggagcgttttaaatcaaactataaaacgacatcgaattctacatatcaccattcaagttttagaacttcagaagtaccatctgcagtatttggtacaaaaaaacgccgaccaattgaaaatggtgttatccctccattaaaagagaatgaaaatgatgataatcataatgacgataaaaataatttaacacaagatcaaacagcacaacgagtatctgataatgatgtaaaaacaaatataagcaagtctaaaaatgaaccgttgaatcaaactaagtatgaagatactgagatttcaattattaatgatcaaaattctaatatttatgaaactacatcttcaaaaagtaaagttcctaatttttctcaaaaagataatacggtgaatattgagaatatttatgcgtcacaaatagtagaagaaattagacgtgaaagagaaaaaaaagcacaacaaaaacgtaaatttaaagaagctttacagaataagcgtcaacaatcatcggatagtgataacgaaatccaaaaagtcattgatgaaatgtatgcaaatcaagctaagcagtacactggagagagttctctagatcatgaagaaaataatgatgaagagagaacgacacatacagaagatagtactgataaaatggaagacacaaatgagaatactacagataatcatgtgattgatgaagggactcaaactgattcaaatacatctaattatgatgacgatgatgagcagtatcaatatgaagaaattgatttgaaatctgtcccaaatattcaaactgttaatgataaagatgtagaaatacgagaagttaatgatacgacatctacagacgaacataatgatgatcaattgtcagaagataatcttaacgtagcacctatacattcaactaaagacaaacatcatcatcttaataaaaatgaagatgctcatttaagtaaagctaataaattgcaagaagataattatacttcaaaagaagaagtagaggaagcaaagtatcatgagatgaacgtttcttcgaatgaagatataactaaacaatcaaatcataacgatgatgacattgaccattcaattgataatgcaattgaaacagatactgagtatgcttctgaacaagttgaacataacaatgattcagttcatgactcatcatctaacactgaaggggaaaaattagaagatgatgacaaacaaatcgttgaaaatgaggatgtttcatcatctattaaatcttcaatcattccgggtagtaaaccttttaacgttgtgatgacgccatctgacaagaagcgtttgatggatgctaaaaaattcaaaaaaactaataaagttaccgttccagaattaaaaccagaaacaaaattggaacgtaaatcagttagtataccaagttcaagtccatcagtaaaagcgactaataatcatgaagagcatattaaaaagaatattaatgaacaatcacttcaagataatcaagaagatgaaacgagtgaactttcaaatgtacaaaatgaaaatacacaagccatatctatgacattaaatactcagaatgaagatcaagatgaaaacgagcaacacgaaagtaaagctgcgattagaaaaggtcctaatattaaattaccaagtcttgaattattagaagatccggaaattcatcaaattgataactcatggattgaagagaaaaaacaagaattaaatgatgcgttttattactttaatgttcctgcagaagttcaaaatgtgactgtaggtccaagtgtaacacgatttgagttagctgttgaaaaaggtgtgaaagtttcgagaattactgctttgcaagatgatttaaagatggcactggccgctaaagatataagaattgaagcacctattccaggtacaagcttggtaggtattgaagtaccaaatcaaaattcttcaaaagtaagtttaaaatcaatcttagaatcacctaagtttaaagatactgaatctaaattaacagtagctatgggtaatcggattaataatgagccattattaatggatattgctaaaacgcctcatgctttaatagctggagcgacaggttcaggtaaatctgtatgtattaacagtatattaatgtcattattatataaaaatcatccagaagagttgagattattattgattgatccaaaaatggttgaattagcgccatataatgacttaccacatcttgtttcaccagttattacagatgttaaagcagctactcaaagtttaaagtgggctgttgaagagatggaaagacgttataaactgtttgcaaaatatcacgtacgcaatattactgctttcaataaaaaagcgtcttacgaacaacgtatgcctaagatagtcattgttattgatgaattagcagatttaatgatgatggctccacaagaagtagaacaatctattgctagaattgctcaaaaagcgagagcttgtggaattcatatgttagtagcgacacaaagaccttcagttaatgttattactggacttattaaagctaatataccaacccgtattgcatttatggtgtcttcaagcgtggactctagaactattattgatagtggaggcgctgaaagactattagggtacggtgatatgctatatttaggtagtggtatgaataaacctatacgtgtacaaggtacatttgtatctgatgaagaaattgatgatgtcgttgatttcatcaaagcacaaagagaaccagaatatttatttgaagaaaaagaattgttgaaaaagactcaaactcaagcacgagatgaattatttgatgatgtttgtagttttatggtcaaagaaggacatatatctacttcattaatccaacgacatttccaaattggttataatcgtgcagcaagaatcgtcgatcaattagaacaactagattatatatctggagcaaacggctctaaaccaagagatgtatttattactgaggcagatttaaagaaagattaattttaaaggagttttatggatatgacgcattatcattttgtcggaattaaaggtgcaggaatgagttcattagcacaaattatgcacgatttaggacatgaagttcaaggttcagatattgaaaaatatgtatttacagaaggagcacttaaaaataaagggattaaaattttaccatttagtgtagataatatacatgaaggaatggtagttattcaaggtaatgcatttcctgatacacatgaagaaattgttagagcacatgaattaaagttggatgtgattagatatcatgattttcttggtcaagtcattaatcaatatacatcggtagcagttacaggtgctcatggtaaaacgtctacaactggtttattatctcacgttatgaatggagacaagaaaacatcattcttaattggtgatggtacaggaatgggtttaccaggtagtgattattttgcatttgaagcgtgtgaatatagacgtcactttttaagctatcacccagattatgcaattatgacaaatattgattatgaccatcctgattattttaaaaatatcgacgatgttgctagtgctttccaagaaatggcaaataatgtaaaaaaagctattattgcttggggagatgatgaacatttaagaaatttaaaagcagatgtacctatttattattatggtcttagtaaaaacgatgatgtatatgcagataatatacaaataactgaaaatggtactcagtttgatgtgtatattaatggagaatactatgatcaatttttaacaccacaatatggtaatcataatattcaaaatgccttagcagtcattacaattagttatcttgaaaaaatggatgttaataatattaaagaagctttagaaacatttggtggtgtaaaacgtcgctttaatgaaacttttgtttcaaaacaagtattagtagacgattatgctcaccatccaagagaaattagtgctacaattgaaacagcacgaaaaaaatatccaaataaagatgtcgttgcagtattccaacctcatacgttttcaagaactcaagctttcttagatgaatttgctgatgcattaagtaaagcagaccacgtatttttatgtgaaatttttggttcaatacgtgaaaatactggagaattaactatccaagatttaataaatcgtattgacggatctgcgttaatcgatgaaaatagtattgatgtattagaaaaatttgataatgctgttattctatttatgggtgccggagatattcaaaaaattcaacgtgcttatgaagaaaaaattggtatgtcaaaagaattctaatatgtttatatataattattatgggtatttataattaatgacttttattttaaaagaatatttaggaggcgttttttatgcattggattttaccaattgctggaattattgctgcaatcgcattcttaattttatgtattggaattgtcgtagttttaatttcagttaagaaaaatttagatcatgtggctaaaacacttgatggtgttgaaggtcaagttcaaggtattactcgtgaaactactgatttacttcataaagctaatcgcttaactgaagacattcaaggtaaagttgaacgtttaaactctgttgttgatggtgttaaaggtattggcgactcagttcaaactttaaatagctcagttgatcgtgtaactaactcaatcacacataatatttctcaaaatgaagataaaatttctcaagtagttcaatggtcaaatgttgcaatggaaattgctgacaaatggcaaaatagacactatcgtagaggaagtgcaaactacagagctaactctgtagctaatgatgcaaatcaaaattacactacaaacgttgagaaaaacttttaatatgattcaatcaaatgcacttaaatgaggtttttacttgtttaagtgcatttcttataggaggaataaatatgagtaagaaatataatcgtgactcatttgaaacgaacaacactagcaatgatttacatggtagaggtgcgaatcaacaagaagacgtagcgcaaagtagtgcgacaaaacactacgatagagatgcatttgaaacgaacaacactggtaatgatttacatggtagaggtgcgaatcaacaagaggacgtagcgcaaagtaatgcgacaaaacattacgatagagatgcatttgaaacgaacaacactggtaatgatttacatggtagaggtgcgaatcaacaagaagacgtagcgcaaagtagtgcaacaaaacattacgatagagatgcatttgaaacaaataactcaggtaatgacttacatggtcatggcgtaaatcaacctaatggtgatgtgtacacaaatgcgacaaaacattacgatagagatgcatttgaaacgaacaacactggtaatgatttacatggtagaggtgcgaatcaacaagaggacgtagcgcaaagtaatgcgacaaaacattacgatagagatgcatttgaaacaaataactcaagtaatgacttacacggtcatggagtaaatcaactagatcaaaacaactttgttaatacaccacattataatcgtgatgactatgagagttataatcatccaaaattctcaaatcaagctgctagtgatactaatcaagagattgattataaaacttattataatgatccaagatttaagtctcgtaaacgttttattgttagctttattaccggtgcaatcattggctcaactattggacttttaactaaaaataaagcaaaccaaaaaattgatgatttaaaagcaaaagaacaagaagttaaagataattattatagtattaaacaacaaacagaagaaacaattgataatgtaagacataaaattgaagacttaaaaaatagaaaaaatacaggtatttcttccgatgagcttgcagcacaacgtcgagcaattcaatcagaaacatcaaatcatttagcagatgaatcaccattagcaaaagaaatacaagaagctaaagctgaaactacagtaaaagaaaataattatattaataatgaacataatagtgcggaagaaattgtagcacaacaaaatgctattaaagatgagttgtcaaataacttagcagacgaatcgccacaagcgcaagaaatacaagaagctaaaaaagaagcaattgctaaagatgaaaaacaagaagaaacagatgcacttgcagcacaacgtcgagcaattcaatcagaaacatcaagcaatttggcagacgaatcaccacaagcgcaagaaatacaagaagccaaaaaagaagcaatcactaaagatgaaaaacaagaagaaacagatgcacttgcagcacaacgccgagcaattcaatcagaaacatcaagtaacttagcagacgaatcaccacaagcgcaagaaatacaagaagccaaaaaagaagcaattgctaaagatgaaaaacaagaagaaacagatgcacttgcagcacaacgtcgagcaattcaatcagaaacatcaagcaatttggcagacgaatcaccacaagcgcaagaaatacaagaagccaaaaaagaagcaatcactaaagatgaaaaacaagaagaaacagatgcacttgcagcacaacgccgagcaattcaatcagaaacatcaagtaacttagcagacgaatcaccacaagcgcaagaaatacaagaagccaaaaaagaaacaatcgctaaagatgaaaaacaagaagaaacagatgcacttgcagcacaacgtcgtgcagttcaaaatgaatcagaaataaatcaattatctaatccagcaagaagtcatcaaactcaaaacagcgaaaatgaatcacaagcttctaaaattgcatcggcagctagaactaagcaagctaagttaaaagataataaagatgtagcaagtaatactcaaaaattatttgaggaggcaccaataacatcttctaaatatgataaagtgcctaatttgataactaaaaatcataagtcatttaataaagatgaagaaataacaaaaaataaacaaactcaccatgatgctaaatttgaaaaaggagttattactcaccaacatcaaccatctcaatcaaattcaaatcaaaaaaataaaaaacataatcaaaaacgtaaaaatcagaatcaaaaaaataaaaataaaaacaaaacgccaaagcaacaacaaagagctgaaaaagcaaatagtaaaatagaaaaacgtacatttaatgattaatattttttaaagagcagtgtaatattttacattgctcttttaattctttatatagtattattaattatattaattttaataattcagaaatattagaaaatttattcgatttatagttgaacatttttaatgtaattgttagaatactatctaaatacaattattttaccgctttaaagtaatataattcagtatagtaaaatttattgaggtgagtatgaatgtctacaaagttagaacaatacagggaagagataatttcaattaataatcaaattttagacttattatcaaaaagaggggaattagctcaaaaaataggagaagaaaaaattaagcaaggtactaaagtttatgaccctcaacgagaaaaagaaatgattaatgaattaatggatcgtaataacggaccatttaatgataatgtaattaaacaattgtttaaagaaatctttaaagcgtctactgatttacaaaaatcagaaaatgaaaagcacttatatgtttcaagaaaattaaaaccggaagatacaattgtaaaatttgataatggtggagttattggtgatggaaataaatcatttgtatttggtccatgttctgttgaatctcaagaacaagttgatgcagtagctcgtgatttacaagccaaaggtgagaaatttattagaggcggtgcatttaaaccaagaacatcaccatacgatttccaaggattaggaattgaagggcttaaaatattgaaaaatgttaaagataaattcaatcttaatattgttagtgaaattgtaaatccagctgatttcgaaattgctgatgaatacttagatgtcttccaaattggtgcaagaaatatgcaaaattttgaattacttaaagaagctggacgtacaaataagccaatcttattaaaacgtggtttatcagctactattgaggaatttacatttgcagctgaatacattgcttctcaaggtaataaaaatattattctatgtgaacgtggtattcgtacttatgaaaaagctactcgtaatacacttgatatttctgccgtacctatcttaaaacaaggtactcacttaccagtaatggtagatgttacacatagtacaggacgtaaggatattatgttaccgactgcaaaagcagcacttgcagtgggtgcagacggagtaatggcagaagtacatccaaatccatcagtagctttaagtgatagtggtcaacaaatggatttaaatgagtttgataaattttataatgaattaaagccattagctgacatgtacaattctaaacaacttaaataaaacatcatactttaatttactagctattcattttactaaaatatagggcaatatagaaagttttatatttaacttctatattgttcttttttagttaaaacgaatagttttattttgattttattaaatctattaactaaaatttgacacaattgtgaatataagtcttatatatttgacacataaccaatttatgataaactttgaaaatgaaatgaaaacacgttataataataaatgaaacgcttacaaggaggaaattatgacggtaactatatatgatgtagctagagaagctcgtgtatctatggcaactgtatcacgagtagttaatggcaatcaaaacgtaaaaccagaaacacgtaaaaaagtaaatgatgttattcaaagattaaattatagaccaaatgctgttgcaagaggactagctagtaaacgtacaactacagtaggcgttattataccagatatctctaatatttattattctcaacttgctagaggtattgaagatattgcaacaatgtataagtatcactctatcatttctaattcagataatgattcagaaaaagaaaaagaaatttttaataatttgttaagtaaacaagtagatggcattatctttttaggtggtacaatttctgatgaaatcaaagatttaattaatcattcttcagttccagttgtagtatctggcacaaatggtaaagatgacaatatcgcatctgttaatatcgattttgctaaagctgccagagaagttacagaacaacttattaaaacaggcgcaaaagattttgtacttgtaagtggagattattctaaaaaggctcaagaagatgtactaagtggtttgaaagatgctttaaacaaacatcaattaaagttaaataacactatagaattatcaggttcagaaagctataaagacggagtgaatgtttttgaaaaattaaaaaataatttacctgatgctatattatctattagtgatgaacaagcaattggtattttgcatagtgctcttgatgctggaataaaagttccagaagaactacaaatcgttagttttaataatacgcgtttggtagaaatggttagacctaaactatctagtgtcattcaaccattgtatgacatcggagcagtaggtatgcgtcttcttactaaatttatgaatgaagaagacattgcagaacctaatgtagttttgccacatagaattgaatatcgaaatactactaaataaagtaatgtagaaaaaaggataaaatgaataattttatccttttttaatatataagttactataatataattatgtaaaccttttaatattactaaatttatttttaaggaaattaaatatttttgtaaacgctatcaagtattcgacatatatttgtttgttagttattataaagtagtaagatgatttggtagttatttctaaatatcttattacataaaatttattttaaacaaggggttgaaataatttggcacatttatcagatttagatattgctaatcaatcagaattaaaaccaattggagacattgcaaaaaaagcaggaatacctgaacatgctttagagcaatatggacactacaaagctaaaattgatattaatcaagttcaatcaaaagaagaaaaaggtaaagttgtcttagtaactgcaatgagccctacaccagctggtgaaggtaaatcaactgtaacagtaggcttagctgatgcttttaatgagttaaataaaaatgtaatggttgctttacgtgaacctgctttagggccaactttcggaattaaaggtggcgccactggtgggggatatgcgcaggttttacctatggaagatattaatttacactttaacggcgatttccatgcaattacaacagcgaataatgcattatcagcatttatagacaatcacattcatcaaggtaatgatttagcaattgatgtacgtcgtgttgaatggaaacgtgtacttgatatgaatgatcgtgcattacgtaatgtcatcgttgggttaggtggaccaactaacggtgttccacgtgaagatggtttcaatatcactgtagcatctgaaataatggcgattttatgtttagctcgtaatattaatgatttaaaagaaaaaatcagtcgtattacagttggttatactcgtgaacgtaaaccaattactgttgcagacttaaaagttgaaggcgctcttgcaatgatacttaaagatgcaattaaacctaatttagtacaaactattgaaggaacaccagcacttgtacatggtgggccatttgctaatattgctcatggttgtaactcgattttagcaactgaaactgcacgtgatttggcagatattgttgttacagaagcaggctttggttcagatttaggcgctgaaaaatttatagacatcaaagcacgtgaagcaggctttgaaccttctgcagttgtcctagtagctactgttcgtgcgttaaaaatgcatggaggtgttgctaaagataatctaaaagaagaaaatgtcgaagcagttaaagctggtattgttaatttagagcgtcatgttaataatattagaaaatttggagtagaacctgtggttgctttaaatgcatttgtacatgatactgaagatgaaactgaagcagttaaagcttgggctaaagaaaataatgtacgaattgccttaacagaagtatgggaaaaaggcggtaaaggtggcgttgatcttgctaatcaagttcttgaagtcatcgatcaaccacaagaatttaaattcttgtatgatttagatcaatcattagaagaaaaaattgaaacaattgtaaaagaaatctatggtggttcttcagtaacgttcagtaaaaaagcaaaaaaacaattaaaagaatttaccgacaatggatggggcaaatatccaatctgtatggctaaaacacaatactcatttagtgatgatgcaaccgctttaggtgcaccaactgattttgatataactatcagggaattagaagctaaaacaggcgctggatttattgttgcattaacaggggcaattatgacaatgccgggattacctaaaaaaccagcggcattaaacatggatgtcactgatgaaggtcatgcagtaggattattctaatttagattaaagaaaaagcgtttgagacatttactgtctcagacgtttttttgttttaccaacaaatttcatcattttgttggtaaaactgcatatgaaaaaacaagcgatttagcggcaaaatcaagtaaaaaacgaatttcaggtaatttaaatcatatatcgatattttgtgttattactatcatatatttattttaaaaggttcttaaattcaatactcataaatcatttaaattaatatatgtgcgatataagatattgattgattcattgaggcttagttaataaatgatcataaatagtatattgttttgcctgttgatatgtctttttactgattaccccttccactagcattcgttttaatacataatactgacggtcaatactaattttaacttcgttataagacttcaaatcaccattatcttcatacggtgtatacgtataagggctttgcaataagccaacaagataagcagattgtgcaacatttaacttggaggggggaacgttaaataaactataggaagcagacgcaattccagttatatttgcaccattataatcgcgtccaaacggtacaatatttaaatatgtataaataatttcatttttagataatattttttcaagacgcatcgctaatataatttcatttgccttacgactatatgttttttcatttgataagacttgattctttattaattgttgtgtaattgtacttccgccagaacgagaatttaaacttaaaacatcttgtatcattgctcttattaacgcttttggtaaaattccatcatgtttaaaaaataatgtgtcttcagaagatattaatgctttaattacgtttgaatttacatgttttggacctacgatgagagagttttgagaatgatcatactcagttaaaatatttttatcgtgattcaaaatctcatcacctgaaaagtgtagtacgcggtgtttcaattcagtatcacttatatttgaagcttcttgagtaagatgatgaaaataagtagcagtaccaagaacaataagtatagaacctaaaactataatactcaaaagacctaccataatatgttttataaacttataatttttttcaaacgttttaaattgagcatctttaaataataatttcatggtagtcctcctcaaattaaatacagtatatcatatctagcatatttgacttttagaagaggtttttttataattattatcaattcaatatgtattgaataagaggagaagtaatatataaattaacttaacagagagttagtggatgctgtgaactaacatgtgtttatatatgaatacacctcatacttatttattcaacgtttattaatgagcgtatcattaatagagtaaacaattctatttgaattgttaagtatggtggtaacgtgcataagcgcccttacattgttgtgagggtgcttttttatttaataaaaataaattttataggaggatataactatgtcaaatgcattactagaagaattacaatggagaggtttaatttatcaacaaactgatgaacaaggtattgaagatttattaaataaagaacaagtaacgttgtattgtggtgcagatccaactgctgatagtttacatattggtcatcttttaccatttatgacattacgtcgattccaagaacatggtcatcgtccaatagtacttattggtggaggcactggtatgattggagacccatctggtaaatctgaagaacgtgtattacaaactgaagatcaagtagcaaaaaatgtcgaaggcttaagcgctcaaatgcataaattatttgaatttggcacagataaaggagccgtactcgttaataataaagattggttaagtcaaatttcactaataagtttcctacgtgattatggtaaacatgtaggtgtcaattatatgctaggtaaagattcaattcaatcacgattagaaaatgggatttcatatacagaatttacgtatactattttacaagcaattgactttggccacttaaatcgtgaacttaattgtaaaattcaagttggtggttctgatcaatggggtaatattacaagtggtattgagttaatgcgacgtatgtatggtcaaacagaagcttatggtttaactattccattagtgacaaagtctgatggtaaaaagtttgggaaatcagaatctggagctgtttggttagatgctgaaaaaacaacaccgtatgaattttatcaattttggattaatcaatctgatgaagacgttattaaattcttaaaatactttacattcttaagtaaagaagatattaatcgccttgaacaatctagagatgaagcaccacatttacgagaagctcaaaaagcacttgctgaaaatgtaacagaatttattcatggtaaagaagcacttgatgatgcaattagaatttcagaagcattatttaaaggtgatttaaaatctttatcaagtaaagatatcaaaacagggtttaaagaagtacctcaagttgaagtttctaaagcaacaactaacattattgatgttttaattgaatctggaattgcttcctcaaaacgacaagcaagagaagatgtaaacaacggagcaatttatattaatggtgaaagagaacagtctgttgatcacaacttaactgatgaagataaatttgataatgaatttacaattattcgccgtggtaagaaaaaatacttcatggtaaattataaataatcttatctgagaaggatatattgaaaacgaggttaatccattattttggattaacctcgttatttattatcgaataaattgactattattatcttcagaattatatgattgcgaagatattgatttttgatttttaagagtgactgatacgtctttagttttaccatcacgtataacagtcaacttcacggtttcacctggctttttattttgatataagtatgttcttaaatcagtatcatcatctacttttttactatctactttagtaatgatatcgccaacttttaattcactagagtggctaacttttgctacatacacaccagtatcacgatcagttttcaaatcttttttataagaatctggaatatcacttaagttaagtaaccctattccaattgaaggacgttctactttaccatgtttaacgagttgttcaattgtaactcttacttcattacttgggattgcaaaaccaataccttcaacttggtcagcagcaattttcattgaattaatacctactaaattaccattaacatctactaatgcacccccagagttaccaggattaattgctgcatctgtttgtagcacattcactttagttccaccagaagtggtattagattcaattgtacgttcatttgcagaaataatacctgatgttactgagttagcaaattctaagccaagtgggttacccattgcgaaaacactatcgccagtttgaactttagaagaatttgcgaatttcattgctttaattcctttttgagaatcaatttttaaaactgcaatatctgaaactgcatctgtacctacaagctttgcttctacttgtttaccattatgtaattgtactttaatttgtgatgcaccatcaataacatgattattagtgacgatataagaagaattgttgttaatttgataaataacaccagaaccgataccagcttcttgtgctttagttgatttaccttgtaataaatcgtcaaaacttgttgccttttgcatattgatgacacctacaatagcaggagagacatctttgatcatggcattaaccgatttatatttatcacttttaccgtctaacacattgccacctttatcattcgtagcttgttggacttgagatccaccactatttgaatcatctccattcataagtcgattaactcctaaaacaattaatgctcctatgataccagcgattagagcaataataataattctaaaccatggaaacttcggtttaggtggacgtgaatgttgataatcactggattgaaaatattgattatattttgtcatatgaaacctccgtatttattttaaccattatctcaattatgaagaaaatatttaaatatttctagtaaatagctatcagtcttaagatgtatcttttaaaatcttgttcacgtgataagttaatgataaaatcgactaagtgtagaaacttagaagtaggtgacaaaatgtataaatttattagtaaatttttagaattaataattgtaaaaatggcacgttcattacatgttgtaggtaaagagaacattcctaaagatagtaaatatgttgtgacttgtacccatgaaagttataatgaagtaattttattaggattagctttaattccaaatgaaattcattatatggctaaaaaagaattatttagtaataaatggggtggcaaatttttaagatctttaaatgcttttccagtagatcgagaaaatccgggacctagtacgttaaagcaacctgttaaattattgaaagatcataaaacagtaggtatcttcccaacaggtcatagaacttcagttgaaggcgcgcctttaaaacgtggagctgcaacgattgctatgctagctaaagcaccaatcttaccagctgcttatgttggaccaacgaagttacatggtttagtcactggtcaagcgatgattaaatttggtaaacctatttatcagtctgacatacctaaagatttaaagcgtaacgaaaaaattgattttctaactaaagaaatagaaagacgtacagcacagttacaacatgaacttcatcttattcaagaacgtctttaatagatattgatagcattattcatcagaagattttctaaatagagaatcttctttttttataaataattgataaatggatgataggagtacaatgagtgaaaatgacaagttttaagaaatctattttccgttagtaccatatattatctaatgtattgttcttgttattttgactttaatcatttttatttagtcaatgtggaaagattatttaataaaaaaatggatttgaagtaaaataccagttaattatctcaatcaataataaaaatcacttataatatcttattaaatatatatatacgttttaatctttattggttaaagcgtatcttttttatattgtcatcacattgtctatttatataaaataaacatatagcgtaaccgcttacaaatatggtagattatatattggactaaatacataaaaaatataatttttaataaataaaggagaataaaagatgtttaaattctttcaaaatctcggaagatcgttaatgctccctgtagctgttttaccagcaggagcaatcataaccgggataggtaacttactaaacgcacttcatgttcttcccacagtagccatgttcttttcaattgtaggaagagctattttaggacaattaggattaatttttgctatcggtgtagctattggtatggctaaaaagaacgatggggcggttgctttggcaggtgcgttaggatatgctatggtaacgaaagtattaaatccagaaaatgtggctacgttatttaatataaaagaaaaagcagttaacttaggctttacaaaaatggataattctaatgtatttcttggtattattatcgggttaattgcagcatattcttttaataaatttagtgaagttgaattacctatagccttgtcattttttagtggtaaacgattagtacctattatgactgtattttttagtaccatattagcagttatactattatttatttggcctatggtcttttcaggcattgttgcatttggagaatggttagtaggttttggttcattcggggcatttttatatggtgtctttaatcgattacttattcctactggtttacatcatgcattgaatgcagtattttggttcgatacagcaggaattaatgatattggtaaattccaaacaggtgtagatgcagtaaaaggtataacaggacgttatcaagcaggtttcttcccaattatgatgtttggtataccagcagcagcacttgcaatgtatcacagtgctgagacaaagcaacaaaagcaagtatggggatggtttttagcaagtgctatttcagcatttgtagtaggcgttacagagccaattgaatttgcatttatgtttgttgcacctgtactttttatcatacatgccttattaacaggactttcattacttattgcatctctatttcattggactgcgggattctcatttagtgcaggattaattgattatgttttatcgctaattaatccagtcgctaatcaccctttaatgctattagttcaaggtattgtattctttattttatattatattatttttagaattatgattaaagtattgaatttaaatacaataggacgtggtgataacttactagctgatccagtagtagaagaaacgacgactacagataaatcaaaaagtggaaaatatcatcaaccagctacacaaatattagaaggtttaggtggaaaatctaatattgatagtttaacaaactgtgctacacgacttcgcttagaactaaaagataatacaattattgatgaacaaaaaattagaaatgctggagctgttggggtgacgaaaaatggccaccattcaacacaagtaattattggtacacatgttcaacaggtagcagatgaaattgaaaaacagttgaaataattcaatagaaacaataaaagcgacaatatatgtccaaatcatttgttacactatagtcctattgataaatattgtttatataaaagagctaatgctagattttaagcattggctcttatttttattacattgactttatataaatgttcgttatgattataagtatcagaatagtcaaaaaatggagagatgtcgatgaaatcaattttatttgatgtagatggtgtgtttttaagtgaagaacgttgctttgatgtatctgccttaacagtagaagaactattaaagagtgatgactttttaggtttagatagcgctcaaaattttaattatatgaatgatgaattaattgaagatataagaacacgagtatttttaaatgatcaaattttaaatcaattaaaatctttaggccttaattctaactgggatatgctatttgttgtatttagtattcactttatccatctcttgaaacagttggattcagaaacaattagacaagtgactcatgttgaaacgttttcagttgagactctacgtgaattacaatcttataatgatcaatttaaagttaattatgcagtaccgttaaaatttattcaaaatagtcaaagtggtaaagagaatatttatcttgaattagaaggttatgcaaaagatcaattaaatattgaaaatgctaaattatttaatttaaaaagtccactttggaatttagctagagcagtatatcaagaatggtatttaggaacaactttatatgaaaaagtagaaaaacttactcctttgtctattcttaaatctggttttatttatgaagaaatgatcttacgtcctgtggaagaaattaaaactttattaaatgatataaaacaagcaggttttaacattgccattgcaactggtagaccaagaacagaaaccattgttccatttgaatcctttggtcttaaaactttttttaatgaaaagcatattgttacagcgagtgaagtattgaaagctgagtcagtatttccaaaagaagggccactaggtaaacctaatccatttagttatattgcaactctttatggaaacaatgagagagattatttgcactatattcaaaatcaaacacatattgttaatgaggatgatgtatttattgttggtgattcattagcggatttattatgtgctaaaaagattggggcaacatttataggtactttaactggtttaagtggggaaggagcaaaagaagagctagagcaacatggtgctgactatattgttaatcatatttgtgacattagacatattctacttaataaataataaaaagaagggaacgccgaatattatcgtcgttcctttcttatttattatattgataaagttgtaccgtagattttatcaaaatcaccaatctcatataattctttaataacttgttgagtaataggttgatctactgacagaatcatcattgcttgtccaccttcagaacttcttcctaaagacattgaagcaatattgatatcatgtttaccgagtagttgacctgttaaacctaccattcctggtaagtctttatgataagaaataaattgataagcattaggtttaaaatctactgaataatcattaattcttacaatacgtgcaccaaatccgtctattacagttgcaccaattttcacctcttcatgttcacttatcaaattaatttgaatataattgctgaatgtcccctgtgaagcacgattttcaatatgatgagtgataccttgttcgtttaataatgcaatagcattaattaagttcacgcgttcacctaaattttgttttaaaattgacgtgacgattgagcgagtaattaaatcagcttcttttttagcatgttctccgttaaaagtcactttaatctctctaggcgcatcatctaataattgaattgccaattcacctgaaagctggctaatacgaagccattgttgtgttttctcatcaatatgatttaagtttaacttaggtgcattgactgcgtttgtaacattaccattttctaaaatatcaatgatttctttagcaactgatacagctactttttcttgtgcttcaatcgtagatgcacctaaatgaggagttacaataatatttttatgatcgagcagcggtgaatctagaggaggttcattttcaaatacgtctaatgctgctctagcaatttgatgttgatttaaggcattaagcaagtcgttttcattaataattccgcctctagctacattaataatttgtaacgttggtttagcttgattaaagaaatgagcatcgataataccttttgttttaggtgttaatggtgtgtgaacggtaacaaaatctgaacgttgagcaatttcatcaattgttgctagttcaattccaagttgctctgctttttctttagtcaaaaaagggtcataagctaaaatagtcataccaaaactttttaatctttttgctacacctaaaccaatacgtcctgctccaatgacgcctaatactttttgatataattcaactcctttaaatgctttacgattccattctttatactttagtgatgtgtaagcttgcggtatatttcgtgccattgctagaatcatagcaactgagtgctcagtagcagaaatcgtatttccatcgggagcatttacaacgagtataccatttagagttgctgattttatatcaatattatccacacctacaccggctctagcaataacttttaagtttgaagcatggttaataatagattctgtgacttgagtttgactacgtacgattaacccttgatagttaggaataatatcgacaagttctttttcagttaaaccagatttaaaatcaaccttaaaatcaggatgatggattaaactttgtaaacctttttctgaaattggatctgaaactaaaatattatgcgtcatgttgaattacctccgtaaattttagcgtagctttgccaatataattgactttacgataatctgtaagaatgatttctaaagctgaaacaacagataaaatatcaaaaggtgacacttttcccatgtgaccaattctcaaaatggttccttttagtttgccttgaccaccagcaatagtaatattaaatcttgattttagtgttgatttaatatatgttaattcgtctttatcgtgagggataaaagaagtaacagtaggagaggcatatgagtctttagtaactaataaatttaaatctaatgcttttaaactttctcttaaaccatctctaatcaagtaatgtctgtgaatggtattgttaaatccttcttttttaataagtgcagcataagcgttaaccgctctaaataatccaacatttggtgtgaatggagtagaattttgttcaatagaatcaaagtacttatttaaatttaaataaaaacgtggtgttttaactgctttaaatcgctcttgtgcacgatgattataagcaacaaaagataggccaggcggtaacattaaagctttctggctacctgacacgagtacatcaatattgtctctttctaaatcgacatcaacggcaccaatacaacttacgccatcgacaacgaagtaaatgtcttgattgaatgctttaatcacttttcctaatttgtgtatagggtgaagtacagcagtagaagtctcgcaaaattgggtgaatacagcagtaatatcatgtttaagtgaatgtaaatatgtttcaaatgcttcaatgtcgaccgcttttccccattcaacatcataaacatgtacattcttataatatgtttcagcaatttgtttaaaacgattgccaaatgcacctgatacaatgactacaaaatgatcctcgggattgactatatttaacatactagcttctaagacgctagtaccacttgaagtaagaatcattactttatttttagttccaaaaataggttttaaatgattaaatgcttcttctgcgatagcttcaaaatctgaagaacgatggcctaccattgataaattaagtgcatgtgtgatttcatcaggtacaggggttggtccaggtgttaataataagggttcataataatacatcgtaaatcttcctcctgatataagattttttaattttaccaaatattctgaaaatttaaaagtctaaaataaaaagcggcagttaaatcgaccgcttttagttctaatcttgaatggttgcttgaatttctattttaacgttgtttcgaattgagttagatatcatacaatgatgatcagcaatatctaatagtttaggaagtcgtttattaagatgcgttttttcttcttctgtaagagatattgttggataatgagtgattttttccattttaaattttccattttcaaacactgcgcttccaattgacttaatttctaaatgaatattagtaaatttagctctttcaagtgtagcagctaaagagataatataacatgatgaggctgctgcaactaacatttcatcgggatttgtcccagttccattaccaccaagtgaagagggaatagaaatttgctcagaaattacatcaccattaactttaccgatttcttcacgacctccacgccatgacgtatgaactacaaaatcgtgtttaaccattattattgacctcctatatcattatggtaatttaagtgtagttgaacatataattaatttaaaggatggtatttaaaaatgaaaatacaaaagcctaatacatcatttcaaatcgttgcacaccgtggattatcgcagaaatatcctgaaaatacggtagaaggttttaaagcagcccttatgcaacatattgatatgttagaaattgatgtacattttacaaaagataaacaattagtagtcattcatgacgattccattgaccgcacatcgaatcaaaagggtaaagtaaaagattttactttagaagaattaaaacaatttgattttggaatcagacatggtgaaacttttaaaaatactcgtatttctacttttagcgaagtactttctttatttaaaaattactctaaaacattacttattgaaataaaaaaaccagaacagtatcctggcattgaaaaagcgttacttgaggaactcgataaatttcaaattccctctcatagagtcattattcagtcatttgatgtggaaagtgttaaaagaatgtctgaatacacaaagaaatatgcactgggtgttttaataagtaaaaagcaatactggtacaaacaacctaattttgaaaatatagcttcttttgcacaatttataaatcctaactataaattaataaataaaaaatttatcaagcgtgctcatgaacatcatcttaaagtaataccttatacagtaaataacatgaaagatgtgaaaaaattgattcatttaggagtagatggaattatttcagatataccagatgatatatttaaattataaataaaaaaccaccctgaccaaaatggaaagggtggtagaatattaatcaacttatcttgagtagtactcaacgattaattgttcattaatttcagctggtaattcactacgttctggtaagcgaacgaaagtactttttaagctgtcagcatcgaaatctaaatattctggtacgaaattgttgatttcaacagattctttaatgatatctaagttttgtgatttttcacgaactgagataacttgaccaggttttaaagtgtatgatgggatgtcaacacgtttaccatcaacttcaatgtgaccatggccaactaattgacgagcttgacgacgtgtacgtgctaaacctaatgagtaaactactgcatctaaacggctagctaataaaatcatgaagttttcaccgtgtacaccgtgttgtttaccagcaatatcaaatgtgttacggaattgtctttcagtcattccatataaataacgtaatttttgtttttcacgtaattgtaaaccatattctgataattttttacgttggtttggaccatgttgtcctggtgcgtaaggacgtttttctaattctttaccagtaccacttaatgagatacctaaacgacgagattttttccagttagaacctctgaaacgagccataataagactcctcctttttcttttttgttggaatgaataaacaaaaaagagtgttgtatgctcattaagatatattgttttatgtgtcttcaccttatagctacagttacatgacacgtccacatcgggaacaacatagagcttaataatatacaactgctattttcgttaattcacacaaaattcattgtaccattattttttaaagtgtcaaggaatcatttaaatttattattttgataattggtgttctaagatagaaactatctcttcaagtccttgttgatcgcctttactaaatcgttgtgtaataggcgcatctatatctaacacgccgattatttcattatcaacatgaattggaacgacaatttcagatttactattagcatcgcaagcgatgtgaccaggaaatgtatttacatcatcgacaagttgtgtttggttatttgcaacagcagttccacatacaccttttcctatagagatatgcacgcaagcaggatggccttggaaaggacctaaaataagttcattattttcaattaaataaaatcctacccaattgatttgatctaagttgtcattgagtaaagctgaagtattacttaaaattgcaattagatttgtttcatcttcaatgagacttgcaagttgtttacctaataagttgtaatttgtttctttaattgtcgtcatataaaaacctctctatgtaatattttgattattagtataaatgtaaaaattttttcaatcaattctttgaattttattttaatgacgggataagatacgttataataatgataatataggaggagaatgagatggttttatacattatattagcaattattattattatattgattgctgtcggtattatgttttatttacgttctaacaaacgtaaaatggttgagcaagcagaagaacgtaaattaaaagttcaacagttaccttttgaagataatttagaaaagttatcagctttaaaccttaaaggtgaaacgagaacaaaatacgacgcgttaaaacaagatacattagatcacactaataactatttagcaccagtagaagaaaaaattcatgacgctgagcttcaacttgataaattccaatttgcaggagctcaaactgaaattgatgacgctcatgaattaatggatagatatgaagctggttatcagtcacaagtagatgaagtaaatgaaattctttctctacataaagataacgaagcaatctatgaaaaatgtaaaatagattatcgtgaaatgaaaagagatgttttagcaaatagacatcaatttggagaagcggcagctcctcttgaaaaacgtattgaggcttttgaaccagaacttgatcagtatgacatgctgaaagaagaaggtaactatgtacaagctcataatcatattaatggattaaatgactctattaatgaaacaaaaggatacatggatgaaattccagatttaattagagaaactcaaaaagagttaccaggacaattccaagatttaaaatatggttgtagagatttaaaagtaaatggttatgacttggatcatgtaaaaattgatggaacattacaaagcttaaaaactgaattaaattttgtagaacctatgattagtcgtcttgaattacaggaagctaatgataaattgcaacaaattaatgataagcttgatgaaatgtatgatttaattgagcatgaagtaaaagctaaaaatgaagttgaagaaacaaaagaagatattacaaatgaattattcaaagcgagagaaatgaactatacgcttagaacagaaatcgactatatacgagaaaactatttcattaatgaaagtgatgttcatagtattagacaacatgaaaatgaaattcaaaatctagttgtagtatatgatgatattctaaaagaaatgtctaaatctgctgtgagatacagtgaagtaaaagataatttagaatacttagatgaacatgtaaaagtgattaatgaagaacaagaaaaattacaaaatcatctgattcaacttagagaagatgaagctgaggctgaagataatctattaaaaattcaatcgaaaaaagaagagatttatcgtcgacttcttgcttcaaacctaacaagtgttccagagcgatttgttattatgaaaaatgaaatcgaccatgaagtaagagcggtcagcgaacaatttaacgaacgtccgcttcatgttaaacaacttaaagataaagtttcaaaaattgtaattcaaatgaatacttttgaagatgaagcgaatgatatattagtcaatgcagtctatgcagaacgattaattcaatatggaaacagatatcgtaaagatcatcatagtgtagataaaagtttaaacgaagcagaacgtttatttaaaaataaccgttataagcgctcaattgaagtatcagagcaagcacttgaaagcgtagaacctggtataacaaaacatattgaaaatgaagtaattaaaggataatacatttttataattagagaatgacctagacatccacatatttctaggttattctcttttattttttttaaaaaatagtataatgcttgagtgtctatttttaagtcgagaaatctaaaatatgttttagatatgttattgatgaaagtgagtgttctatatatatgatttatttagataatgctgccacaacaaaaccaaacccagcggttttagcttcatttctaaaagtaagtgagaaagcttattataatgctaatagtcctcatcaaatgggcttacaatcagaaaaaatattattacaggctaagtcgcgtgtaaaagagatgttaaacctcaataataatactgatgtcattttcacaagtggtgccactgagtctaataatattgcactcaaaggtattgcattaagaaaaaaacagtttgcgaatgtaatcattacctcagtattagaacatccatcagtattagaagtgatgcgttatttagaaacacaaggatttatattgaaatatgtgaatgtgactccaaatggtcaaatagatattaatcatttagaacaattaatgacggataatgtgggcttagttacatgtatgtatgtcaataatgttatgggacaaatacaaccgataaaagaaattggatcattattaaaacaatatcctaaggcacattttcacgtagatggcgtacaggctttagggaaaattccaatgcaattagagaatgtaaatagtgtaagttttagtggtcataaatttaatggtttaaaaggtcaaggcatattaattatcgataataaggaaaaaattgaaccgacagtatttggcggtggccaggaatatggaattagaagtggcactgtaaatttagcaatgaatgtttcacttgtgaaagcaatggaaattgcaattcaaaatttaaatgagcttaatcatcgtctatcacgttataataaagtaattagagaaagtttaagtcaatataaaggagtgtatattaattctccagaaaatagtgctccgcatattttaaatattgcttttccaggagtaaaaggagaagtacttgttaatgcgttctcaaaattggatattatggtgtcgactacaagtgcatgttcgtctaaaagagaaaaattaaatgaagttttgttagcaatggacatcgaggacaacagaatagagggaagcgttcgcttatccatgggtgaaactacaacagaaaaagatatcgaacaatttaaagataaatttaaattaatctatgctcaaataaaggagttgttgaaataaatgaaatatgatcatattttggtaagatatggagaacttacgttaaaaggaacaaatagaaaaagattcacaaatgtattaaaagaaaatgtgattcagtcattacgttcattagaaggtacacgagttaaatgtgagagagatcgcatgtttatctcgctttttgaggaagcaaatgtaaatgaagtcatgaatcgtttaacaaagatatttggcataaaatctattagtccagtatttaaaacaacacaaaatcttgaagatataaaacaactttgtgtttcgttagctaaagactttgcaaatggagatacttttaaaattgatgtaaaacgtgtagataaatcattttcattagatacgtatcaactacaaagagaactaggtggtgtcattttaaaatcagttgatcatttaaaagtagatgttaaacgtccgacacataatattaaagtggaagtacgtaaagaaggcgtatatatctatactaaagttatcgatggtgctggcggattacctacaggtacaggtggtaaaacacttcttcagttatcaggtgggattgattcaccagtagctggtatggaaatgatgaaacgtggcgtaaaaatagaagctattcattttcacagtccaccatttacaagtgaaaaagcgaaagacaaagtgattgaattgacacgcatactatctgaacgtgtaggacccattaaattacatattgttcctttcacagcacttcaaaaacaaatcaataagtctgtgcatccacgatataccatgacttctactagacgcatgatgttacgagtgacagatattattttagaacgtattggagcgaacgctatcgtaaatggtgaaaatttaggtcaagtagctagtcaaacattaaagagcatgtacgcaatcaatgatgttacatctactcctattttaagaccacttatttctttagataaagaagacattataaaaaaagcaaaagaaataggaacatttgaagtttcaatacagccttatgaggattgctgtacgatttttacgcctaaaaaccctgtaactgaaccagattttgataaagttgttaaatatgaaagtgtgtttaactttgataatcttgttcaagaagcagcagacaatgtagaaacaatagagattaataaagattataaaactgaaaaagataaaagtactgatgcactcattgatgaattattttaatatgaaagtattaaagtaatttaataaggggtgggcgttatagaactaagttttcatattattttcattattattagttttggtttcttggcagcatttatagatgctgttgtaggtggcggtggcttaatatcaattcctgcactcttagctataggaatgccgccatcattagcattaggtacaaacaaattagcaagtgcgtttggctcattaacgagtgcaatcaaatttttaaaatctggaaatgttgataaaaaaatagtatttagactatttccgtttgtatttatatttgcagttggtggagcaagtttagctactttcttgccatcagatgttttgaaaccactcgttatagtcatattgacacttgttttaatttacaccatttttaagaaagaatggggtaatgtcagaacgttctctaaatttactattagtaaagcgattgcctttatatcacttctgcttttaattggattttatgacggattcttaggcggaggtactggatcatttatgttatttgtattattaatgtttggatttgattttttaagtgcagctggtaatgcaaaagtattaaactttgcttcaaacgttggtgcattaacattatttattattcttggtcaagtaaatatagcatatggattaattatggcagtcagtatggtgattgggtcgtatactggtgcacattttgcaatcaaaaaaggtgtaggatatgtcaaaattttatttataatagttaccattttactcattttaaaaaatacctttgattatatcatgcaaatcatttcaaattaaaatagtagttagtgttttaaatgattgaaataagtttaaatactatcgtatcattaaactataatttaaataactaatgggaggtcatataatatgacagaaattacttttaaaaataaccctatacatttagaaggaactgaggtttcaaaaggagatgtggctcctaattttaaagttttggataatagtttaaatgaagttactttagataattttaaagggcaaaagaaattgattagtgtcgttccttctattgatactggcgtatgtgatcaacaaactcgcaaatttaatgaagaagcttctcaagaaaatggtgtagtacttacaatttcagcggatttacctttcgctcaaaaaagatggtgtgcatcaaatggtctagaaaatgtaattacgttaagtgaccataaagatttatcatttggtgagcattatggtgttgttatgaaagaaatgagattattagcgcgttctgttttcgtattagatgaaaacaatcatgtagtttataaagagttagttcaagaaggtactgattttccaaatttcgaggctgctttagaagcttatcgtaatatttaagtcactattaaatgattaaattaaagatataatactaatattgtccatatgtattttaaaatgaatgatttcgttttaagacatttgcattatggacatttttttattggaaaggaattgaatatggcagaagaacaaactattatggaaagattattccgaactttagatgataaagctaagtcgttaaatgaagaaaatggtcaaagctttatagaaaatttaggtttagcaatggaagatgtatatcgtaatcaacgtactctattagaacaagcaacgcttcaagatcgtcgaaaagcatttcaatttgcttacttaagcttattacaagaagaaaatattcaggcaaatcatcaaattacaccagattctattggcttaattttaggttttttagtacaaaaatttatagaaaataataaagaattacagattgttgatattgcaagtggagctggtcatttaagcgctacagtgaatgaagtattaaaagatagcgaagttatgcatcacttaattgaagtagatcctgttttatcgagagttagtgtgcatctagcgaattttttagaaataccgtttgatgtgtatcctcaagatgcgattatgccattaccattggaggaagctgatgtggttgttggagattttcctattggatattatcctttagatgaacgtagtaaagaaatgaaacttggatttgaagaaggccatagttattcacactttttactcatcgaacaagccgtctatgctttaaaacaaagtggctatgcttttttagtagtacctagtaatatttttgaagatgaacatgtgaaacagttacaaaattttattactacagaaactgaaatgcaagcatttttaaaccttcctaaaacattgtttaaaaatgaaaatgcacgtaaatcaattttaatactacaaaagaaaaaagcaaatgaaactaagcctgtagaagtgttattagctaatattccggattttaaaaatcctaatcaattccatggttttattaacgaattaaatgagtggatggacgcaaatcattcacaaaaataaactgtgatattcttgaattacttctgtattagtggttaaatagatatggatatttaatatataaattggaggacaatgaatcatgtctaaattagttttagcgattaatgcgggaagttcttctttaaagttccaacttatcagaatgcctgaagaagaattagttacaaagggcttaattgagcgtattggtattaaagattcaatatttactattgaagtaaatggtgaaaaagtaaaaagagttaaagatattaaagatcatgaagaggcaattaatatcatgttagatagcttcaaaaaacatggtattattaatgatattaatgatattgctggtacagggcatcgtgttgttcatggtggagaattattccctaaatctgctttagtcactgatgaagtagaagaaaaaattgagtcattaagtgaattagcgccattacataatcctgcaaacttaatgggagttcgtgcctttagaaagttattacctaatattccacatgttgtagtttttgatacttcattccatcaaactatgccagaaagttcttatttgtatagtttaccatataactattacgaagattttggtattcgtaaatacggtttccatggtacaagccataaatatgtatcacgtcgtgcggctgatattttagaaaaacctattgaagaattacgtattatttcttgtcatattggtaatggtgcgtcaattgctgcaattgatggtgggaaatctatcgatacatcaatgggcttcactccattagcaggtgtaacaatgggtacacgttcaggagatattgatccagctttaattccatttattatggaaaaaacaggtaaaactgctgatgaagttttaacagttttaaacaaagaatctggattattaggtatctctggtacttcaagtgatttacgtgatttattaggtgaagctgccaatggcgatgaacgagctgaacttgctttagatatttttgcttctagaattcacaaatacattggttcttatgctgctagaatgcatggcgttgatgttattgtcttcacagcaggtgtcggtgaaaattcatcaccaatacgtgctaaaattttagaaggcttagagtttatgggtgtttattgggatcctaagaaaaatgaatctactcacggtgaagaagctttcataaattacccacactctccagttaaagtaattgttgttccaactaatgaagaagtcatgattgcaagagacacagtaaaattcggtgaattataagatatattaaaaaaacgatgagattaaacttatctcatcgttttttagaatataacaggggaatagaacaaaagtcatgttgaatttgttgtcccactctaatgttgtatctctaacatattaaagaggtctgagacataaggaattgtctcagacctctttatttacatacattactttattaagaaaattgttttctaaattcaggagttgcaacttcaggttggaaatcatctggaatttcttcagtacgcacgacaagtacgtcacacggtgcatgacgaacgattgcttctgaaacagaaccaacgataaatcgttctactgcatttaatcctgaagtaccacacattattaagtcgacacctaattcatttgctaattttttaggtataattgctttaggtgagccaaattctagacgagtttctacatttgtaacaccagcacgtgaagcaacttctttatagccttttaaaagttcatcagaaaaacctttagatttttctgtgaattgagcatcgtacacttcataagaagagtaagttcttgaatcgataatattaacaatagttaattgagcatcattacgtttagcaacgtctaaagctttgttgaaagcccattctgcttcatgtgaaccatcaactgcgattaaaatatttttataagttaacatcttaagtcccccttaacttttcttaattcaattttaacataaatttctgaatatttaatatttataattcaacaattatgtggacgttgtgcacctttgatgattgcgctttcattaatttagcgttaccataaggagtggaggtggatggaatgaaaatcggtattccaaaagaaataaaaaataatgagaacagagtaggtttatcaccaagtggtatacatgcattagttgaacaaggacatacagtacttgttgaaacaaacgcaggttctggttcatattttgaagacgaagattataaacaagccggtgcagaaatagttaacgatgcaaaaacaacttgggatgtagacatggtgattaaagtaaaagaaccattagaagaagaatataaatatttcagagaaggtcttatcttattcacatacttgcatcttgctaatgaggaaaaacttactcaagcattagttgataataaagtagtaagtattgcctacgaaacagttcaattaccagatcgttctttacctttattaacaccaatgagtgaagttgcaggacgtatgtcagctcaaattggtgcagaattcttacaaaaaattaacggtggaatgggtattctacttggtggcgtgccaggtgtaccaaaaggcaaagttaccattattggtggcggacaagcaggtacaaatgctgctaaaattgctttaggattaggtgcagatgtaactattttagatgtaaatcctaaacgtttagcggaattagaagatgtgtttgacggtcgtgttaatacaataatgtctaacccacttaatattgaaaatgcagttaaagaaagtgacttagttattggtgcagtattaattcctggagcgaaagcaccaagtttagttactgaagatatgattaaacaaatgaaagacggttcagtagtagtcgacattgctattgaccaaggtggtatctttgaaactactgataaaatcacgacacatgatgatccaacttatgttaaacatggtgttgtacattatgcagtagcgaatatgcctggcgcagttccacgtacttctactattgctcttaataatgctactttaccttatgcacagttacttgctaataaaggttataaagaggcatttaaagcaaatgagcctctttcattaggtttaaatacgtataaaggttatgtaactaataaaggtgttgcagaatcctttgatttaacttatacatctattgaagatgcattaaaagaataatctaaattaattcaataaaaagcggaatagcattctttatgagtgtctattctgcttttataaaagagagatttaacttttaaattacttattataatgtgtaagtacttcaaacccagtatcagtgactaaaatatcatcttcaattctgacgccagcgacatcaggcacataaatgccaggttcaattgtaatcaccatacctgcttcaagtaaatttgtatttgtacttgatacatcttgatattcatgttcttctaaaccgagtccatgtcctaatcgatgagggaagaaatcaccgtaacccgcttctgaaataatgtctctagcaattttatcaatattttgtaaagggatacctggtttaattgcttcaatagcactttgttcagcttttaagacaatatcataaatcgttcttgcttctttacttggttcaccaaattttacagttcttgtcatatcactacaataatgattatagactacacctaaatcaaataatacatattcattcttaactaatgttcgatctccaggtgtaccatgtggagatgcagcatggtcaccaaatagtaccattgtatcgaaactcatttcactgacgccatattttttaatttcattttcaatatgatttacaacttctctttcagttacgccttcagataaaaatgaaacaccaatatctatacatttatctgcaagttcagcagctttttttatatttttaacttcattttcatctttaatatttcttagctttttaatagttaaatcgatatcttcatacactttaatgttaaagttattcgtaagttctcgttgacgtttaacagtgagatgttcactttcaattaataatttatcaaatgtatggggtgctaaatcgaaaggactctcagtatctaaatagccaacaatatttccattaaaaggtgaatgcttaacttcttcaacttccattttaggacaatataatgtgcattcaccatttgaagttataagtaacgcaaacaatctttcatgaggttcacttctataacctgtgaagtagaatatattaagtggagtagtaatccatgctgcatcagcatttttatcttttaatgttgcaataatttcgtctgttttaatcataatacgtatcctcctatagtttaatcaatttaattttacgtctaaatagaaatgaattcaaagtgtttcaagttataaatataattatcagggtataataataatattaaaatataggaggttctatatatgaaactttcatttcatggacagtcaacgatttattttgaaagtaatgacaaaaaagtaattgttgatccatttatttctggtaatgataaaagtgatttagatgagcagacattagatgtggattatattattttaacgcatggacatggtgatcattttggtgatgtagttgaattagctaatcgcaatcatgctacagtgattggttctgcagaagtacaaggctatttaacaacgtatcatggaattgaacacgcacatggtatgaatattggcggtaaatatcaatttgatttcggtacagtaaaatttgttcaagccttccacagttcaagttatactaatgaagatggaatacctgtttatttgggtatgccaatgggcgttatcattgaagcagaaggtaaaacaatttaccatgcaggagatactggtttatttagcgatatgaaattaattgctgaacgtcatccagtagatgtatgttttattcctattggtgataattttactatgggtattgaagatgcaagttatgcaataaatgaattcattaaacctaaaatttcagtgcctattcattacaatacattcccattaattgaacaagatccagagaaatttaaagaagcagtatctcaaggagaagtacaaattttacaacctggtgatgaagtgacattttaatgatatatagaaaagacggtaaatatagcatttaccgtctttttttataagattaaaattatttaactattaaaacagggatagtagcacgtttagcaactttatgactaacactacctaaaacaaatttcttttgttgttcagctttacggttacttaatacgacaatgtcatatttaccactatttgcatgtttcaccaattcatcttttggatttccacgaacgataatttgatcataattaataccataatcatctaaagtatgacgtgtgtgttcaagtccttgatcacgacgatgtgtcaatttttcgatgtgagtccctcctttaatagaggcttggatgtcttgttcaccaatcgcattcatgattgtaacaacggtacctgggccagctaattttgaaatttctttcaatgctttgtcattttttaattgagtatctacacctagtaatatatttttatacataggtcatccctccttatatttaattatataattagtgatttaatatttccatcaaatttatatttttattatttaaattaacttcatttttatacattaaaaacaaaatgataccgatatgttagtttttgatacttttgtcacattcaaatcgatttttataaataaaaaagttataatatattagacattgtctaaaaatgaagagggttgaaaatgactaaacatgaacaaattgtatcttatatagaatcattaaatataggacaaaaaatttcagttagaaaaatagccaaagtaatgaatgtttctgaagggactgcttatagagcaattaaagatgctagtcaacttggctttgtaaccaccatcgatagagtgggtacagttcggatagataaaaagagtcgcgaacaaattgaacatcttacttttcaagaaattgtgaatattattgaaggtgacatcataagtgggaaaaatggtttaaataaaactgttagtaaatttgcaattggagctatggaactaaaagatgtagtaaagtatattggaaatcaaacgttattgattgtaggtaaccgtcctgaagttcagatggaagcattaaaaagaggaagcggtatacttattaccggtggatttagtacagctcaaaatattattgattatgcaaataaacaagagttacctattatttcttcaaattatgatacatttttagtagctaatatcattaatagagccatgtataatcaaatgataagaaaagagatacttattgttgaagatatcgtaaaacctatcaatgatatgacggtagtgtttgatgaaatgggtttagaagactatatttctcgtgcaaaagtcacaggacattctcgttttccagtagtaaataaagattggaaacttgtgggaattgtaacgagtaaagaaattattcatatgaacgaagatgataagattaataaagtcatgacaagacgacctatcaatgttgaattaacaactacagtagcgagttgtgctcatataatgatttgggatggaattgaaattttacctgtcacaacaagaaataaaaaagcaataggtgttattacacgaaatgatgtgttaaaagcaatgcaattaattggaagacaacctcaaattggagaaaccattatcgatcaaattgccaaacatatctcaataaatcataatgagacttcagttaaaatttcaccagttttaaccaaccaatatggtacgttgagtaaagcaatatgtgtcgcaattattgaagaaacaattaaacatgaattgcgtaagtataaaaaagtagatgttatgattgaaagcttgaatatcatttatattaaaaatgtcgcaattgaaagtacgcttgatgtaaagtataacatgttagatgtaggaagaaattttgctaaattagaggtcactatgacttgtaaaaatgagaaagttgcaaatgcaatgattatatgtcaaatgtttgaaggtgtttaaaatagtttttgaaattaaaggagaaaagaaatggtagaaatttttaataaaataatgaatgaaattgataaatatgaaactgttattattcatagacacgttcgtcctgatccagatgcatatggttcacagttaggcttaaaatattatttgcaacgtaaatttccagaaaagtctatttatgcagttgggcaaccagaatcttctttagcatttataggggatttagacagagttagagatgatatgtatcaaaacgctctagtgattgtttgtgacacagcaaatgcacctcgtatcgatgatcaaagatttaatcaaggcaaagatttaattaaaattgatcaccatcctgctactgatcaatatggcagaataaattatgtagatactaatgcaagttcaacaagcgaaatcatttttgattttattacacattttaatgatattaatattatcgatgaatctgtcgcacgtgttctatatttaggaattgtcggagacacaggtcgttttttatttagtaataccacaccacatactatgaaggttgctagtcgtttgctagaatttccatttaatcataatgagatattaaatcaattgggtgagaaagatccaaaacttatgccattccaaggatatattttacaaaatttccaattaagtgaagatcatcaatattgccaaataaagattactaaagacgtcctaaaccaatttcaaattgcacctaacgaagcatctcagtttgttaataccgtagcggatatcaaaggtctaaaaatatggatgtttggtgttgatgaaggtgatcaaattagatgtcgattacgttctaaaggaattactattaatgatatagctaatcaatttggcggtggaggacatccaaatgcatctggagtctctgttgaaaattgggaacaatttgagactttaggtgaagccttacgccaaaaactataaattacgaaaggaagtcatatatgtttgtacatttgaatattcattcaacatatgatttattatattcaagtttaaaaattaacgatgttgtatcaaaggcaaaagaaaatagatatcaagcacttgcaattactgatacgaacgtattatatggcttccctaagttttatgacgcatgtgttaaagagggaattaagccaatatttggaatgactgtaatggtttctgatgaaattagcacaattgaaacagtattattcgcaaagaataatgaaggtctccatgctctgtatcaactttcttctgcaataaatatgaaacaaaagactacgatacccctaaaatggctacaaaaatatagttatcatcttgctattgtttttaaagatgctcatgcgtctcatcaatcgttaattcaaacactaaagaataatgagtcagtattcataaatcacacaagtcaattagatttttcagacgataaaattgtctttcttaataatgcaagatatttaaatcctgaagatgcagatacaatacctgcattaaaagcaataaaaaacaatacaaaattggatttagtaaatgatattaaggatgctcatgaatattttccaactagtgaaaatattaaagcatttcaattgtctgaaaaaataatagctaatacaaaggctttagctgatgagtgtaacgcagaaattcaatatcatcaaaatctattgcctaactttaaaacccctaatcaacaaagtactaaatcctatcttttagaaaagttaaaatataatcttaaagaatttaaattagataaagatcagcgatatattgaccgattacatcatgaatattcaataataacgaatatgggattcgaagattattttttgatagtgagcgatttaatacattttgctaaaacgcatgacgtgatggttggacctggacgtggttcatctgcaggatctttagtcagttacttattaggtatcacaactattgatccaattaaatttgatttattattcgagcgctttttaaatccagaacgtgtcactatgccagacattgatatcgattttgaggatacgagaagagaaaaagtgattcagtacgtacaagaaaagtatggtcaatatcacgtatcaggtatcgtcacttttggtcacctattagcaagagctgtagcgagagatgtaggccgtattattggttttgacgaaaaaacattaaatgaaatatcgaatttaatcccacatcaattaggtattacactagaagaagcctatcaaaatgaaaaatttaaagcatttgttcataaaagttatcgtcatgaaaaatggtttgaaattagtaaaaaactagagggcttaccacgtcatacatctacccatgctgctggaataattattaatgataaaccattgtatcattttgctcctttaacaatgggagatacaggtatattgactcaatggacaatgactgaagcagaacgattaggtttattaaaaattgactttcttggtcttagaaatttatcaattattcatcaaattatcactcaagtaaaaaaagatttaaatcttgatatcgatatagaacaaatcccttttaatgatcaaaaagtatttaaattattatctctaggaaacactacaggtatatttcaattagaatcagaaggtgttagaagagtattgatggaattacagcctgaacactttgaagacatcgttgctgtaacatcattgtatagacctggtccaatgcaagaaattcctacatacatatcaagaagacatcgtcaaagtgacattaaatacttacatcctgatttagagcctattttaaagaagacgtatggcgtcattatttatcaagaacaaatcatgcaaattgctagtcaattcgctaattttagttatggtcaagcagatatattgagacgtgcaatgagtaaaaaaaatagagctattctagaaagtgaacgtcaacactttattgaaggggctgtaagtaataattatgatgcatcaattagtgaacgtattttcgaactaatattaaagtttgcggattatggttttcctagagctcatgcagtgagttattctaaaattgcatatatcatggcttatttaaaagtgcattatcctaattatttctacgcgaatattctcagtaatgttataggtaatgaaaccaaaacggcaataataatagaagaagctaaaactcaaagtttaaatattttacctccagatattaataaaagtcactggttttacaaagcgacagaaaaaaatatttatttatcgttgggtgcaataaaaggtgtgggatatcaaagcgtcaaatctatagtagacgaacgatctgaaaatggattgtataaagacttttttgatttcaccagaagaattcctaagaaaattaaaactagaaaattattagaagcattaatatgtgtgggcgcatttgattcatttggtaaaactagatcaacactattatctacaattgatgaagttattgatcaagtttcgaatgttgaacaagatgaatttttatttaatatgttaacaccgaagcaagcctatgaagataaagaggaattcagtgatcaaataattagtgcttatgaaaaagaatacttaggattttatatttctaaccatccagttgaaaaattattttatatcaaacaatatttaggtatatttacgattaagaatagcttagattatcaacctatacttgttcaggttaatcaatttaagcaaataagaacaaaaactggacaacatatggctttcttggttctagatgatggtagaaccactattgatggtgttttgtttccagataagtacaaacaatatgagacaatgagtcaacaacaaaatgatattctagtcgttcatggcaaatttgaagaacgaaatcaaaagagacaaattatcattcaaagtatggatacaattaacgactttgaaaataacaaattatctcaagccaaacaaataatggttagaaacgtcaatcaattagaagatattaaatcatttttaatagatcaaacgacacataacgatttagaagtagttttatttaatgaaatacaacaacaaactcaatctttaggatttttacaaaaagaaatggaacaagtcgaaaggtttataaagatgttcaagccaagtgacatcagaattatataacttttatatgcaaaaaaattatgatatagttaattgatggttataaagaaaaattaataattttattgatttttttatctcttgatttaataacatgtagcatataaaaatggtttttaaaattgaacttaattgttacaaaaatccttcttttcaaaagtaatttaattataaatcaattagagattgattaaatgtctttaagagacgatgcattacaaatgcataaagagaatcaaggtaaattaaaaactacaccttatgttaaagtaaccaatatagaagagctaagtttagcatactctatagaggcagtagaatcgtgtaaagaaagctatgaagaatcaaggaagtagtgctaaagtagtaggaacgagacgaccttattttcgaaatcaaattaataagatattagcttatctaggtgtttttagagttgttttagatattgaatctactcctttcgattaaagagtgacaccatcagcgacacaagatttaacacaatctgctatggaattaggtgttgcatgtattgaagtagatttccatgacgtatatgataaaacaatgaagttaacagatttaaaataaagtaagcgaatttaaaagtaactatttaaaataacgaaattattgagtgagttatgcggaggtttacgcatgtttaaagatttttttaatagaagtagtaaaaaaaagaaatatttaacggtaccggattctaaacaaaatgacgtaccagcgggtatcatgactaaatgtcctaattgtaaaaaaataatgtatacaaaagaactaactgaaaatttaaatgtatgctttaattgtgatcatcatatcgcacttcctgcatacaaaagaatagaagctatttcagatgaaaattcgttcaaagaattcgataaagaaatgacatcttctaatcctttagattttcctggttatcaagaaaaggtggaaaaagatcaaaagaaaacgggtttaaatgaagccatcgtaactggtacagcagaattagatagcgtgaaatatggcattgcagttatggactcacgatttagaatgggaagtatgggttcagtcgtaggggaaaaaatctgtagaatcgttgattattgtactgaacatcggttaccatttgtattattttctgcaagtggtggtgccagaatgcaagaaggtattatttcattaatgcaaatgggaaaaacaagtgtatcattaaaacgacattctgatgctggattattatatgtttcttatttaacacatcctactactggtggtgtatcagctagttttgcttctgtgggtgatattaacctaagcgaacctaaggctttaatcggttttgctggacgtagagttatagaacaaacaattaacgaaaaattgccggaagattttcaaactgctgagtttttattagaacatggtcaattagataaagttgtgcatagaaaagacatgaaagcaacactttctgaaattttaaaactacatcaagaggtgaagacgaatgcttgatttcgagaaatctttatatgagattaaagaaaagattaattcattgaaggaatctcaagaaaaaaatgacgtcgacttacaagatgaaattgatttgttagaagcctctttggaaagagaaagaaaaaaaatatacaccaatttaaaaccttgggatcgagtacaaattgcaagacttcaagaaagacctacaacacttgattatattccatatatctttgattcattcattgaattacatggagatcgtaattttagagatgatcctgcgatgattggtggaataggatatctcaacaatcaaccggtaactatcataggtcagcaacgagggaaagatactaaagataatatttatcgtaattttggaatgtctcatcctgaaggttaccgtaaagctttacgcttaatgaaacaagctgaaaaatttaatcgtcctatttttacgtttattgatacaaaaggtgcatatccgggaaaagcagctgaagaacgagggcaaagtgaatcaattgcgaaaaatttaattgagatggcttctcttaaagtacctgtgattggtgttgtcatcggtgaaggtggaagcggtggtgcgcttggtattggtataactaataaattattaatgcttgaaaatagtacttattctgttatttctccagaaggggcggcagcattactttggaaagatagctctttagcaaaaatggctgctgaaacgatgaaaattactgcaaaagatttactggaactaaacgtggtagatgaagttattaatgaaccacaaggcggcgctcacagagacgtcgtttttcaagcaaaacaaattaaacaatcttttattcatcagcttaatgaattaaataaattagatggacaagctttagcgaatcatcgatttaataaatttagaaatattggtacctttattaattaacacagaatgactagaaatttaattaaaatttctagtcattttttttatataaattaaattaaaaatttaaaacgtttacatatatataatctatcaatattaatggaatagataataaaattatggtaatttatacatgaagattattatagttaggaaagggtatgtcgctatgaagagaattgcggtattaacaagtggtggagattcaccaggcatgaatgctgctgttagagcagtcgtacgaaaagcaatttataataatatcgaagtttttggtgtttatcagggttatcaaggtttacttgatgataatatccacaaacttgaattaggaagtgttggagatacgattcaacgaggaggaacttttctatattctgctagatgtcctcagtttaaagatgagagtgtaagacaaaaagggattgagaacttacacaagcatggtattgaaggacttgtagtagtcggtggagatggcagttatagaggtgctcaacgtattagcgaagaaacaaccgatataaaaacaattggtatccctggaacaattgataatgatattaatggtactgatttcactattggtttcgatacagcattaaatacgattattgactgtgtcgataaaatcagagatactgcttcaagtcatgcgagaacttttgttgtagaagtaatgggacgtgattgtggtgatttagcactgtgggctggattgtcagtaggtgctgaaacaatcttagttccagaagagcacacagatattaaagatgttgctgaaaaaattgaaagtggtattaaacgtggaaaaaaacattctatcgttatggtagcagaaggttgtatgagtggccatgaatgtgcagaacaattaactaaatatatcaatgttgatgcacgtgtatctgttcttggtcacatccaacgtggtggtagtccatctggtgtagatcgagtacttgcttcaagattaggcggttatgctgtagaattgttaatgcaaggtcaaacaggattcggtgtaggtatacaaaataaccaacttacagcaacaccatttgatgaaattttcaataatgaaagccataaattcaacactcgtatttatgacttagcaaaagaattatctatataatttaggaggcttttataatgagaaagactaaaattgtatgtactataggacctgcttcagagtctgaggaaatgttagaaaaattaatgaatgctggaatgaacgttgcacgtttaaatttctctcatggtagtcatgaagaacataaagcacgtattgattcaattcgtaaagtatctaaaaaattaggtaaaactattggtattttattagatactaaaggacctgaaattcgtacacatgatatgaaagacggcttgattgtacttgaaaaaggtaaagaagttattgtgagtatgtctcaagttgaaggtacacctgaaaaattctcagtcacatatgaagatttaattaatgatgttcaaattggatcatacattttattagatgatggtttagtagaattacaagttaaagatattgataaagataaaggcgaagttaaatgtgatatcttaaatactggtgaattaaaaaataaaaaaggtgtaaacttacctggtgttaaagtaaacttacctggtatcactgataaagatgctgcagatattaaatttggtattaaagaagatattgattacattgcagcaagctttgtacgtcgtcctagtgatgtattagatattcgcgaaattttagaacaagaaaataatgataatattacgatcttccctaaaattgaaaaccaagaaggtattgacaatatcgaagagattttagaagtatctgatggtttaatggttgcgcgtggtgacatgggtgttgaaattccacctgaatctgtgccaatcgttcaaaaagatttaattagaaaatgtaataaattaggaaaacctgtcattactgcaactcaaatgcttgattcaatgcaacgtaatccacgtgcaacaagagctgaagcaagtgacgttgctaatgcaatctatgatggtacagatgcagttatgttatctggtgaaacagctgcaggacaatatcctgaagaagcagttaaaacaatgagaaatatcgcaatttcagctgaagctgctcaagattacaaaaaattattatctgatcgtactaaattagtagaaacatcattagtaaatgcgattggtgtatctgtagcacatactgctctaaacttaaatgttaaagcaattgtagctgcaactgaaagtggttcaacagcgattacaatttctaaatatcgtccacattcagatattattgcagtaacacctagtgaacatactgcaagacaattagcactagtatggggtgcatatccagttgttaaaaaaggacgtaaaacaacagatgatttattaaataatgcagtagcaacagctgttgctactgaaaaagttggtaatggtgatttaattatcattactgctggcgttccaactggtgaaaaaggtacgactaatatgatgaaattacatttagtaggtgatgaaattgctaaaggtcaaggtgttggtcgtggatcaacaactggtaaaacagtgatttctaaaactgctagtgatttagaaggaaaagacctaagtgaatcaattattgtgactaattcagtagacgaaagttatgttccatatgttgaaaaagctgcaggtttaattactgaagaaaacggtataacatcaccaagtgcaatcgttggacttgaacaaggtatcccaactattattggtgttgaaaatgcaactaaagaattgaaaaatgacttattaattactgttgatgcaaatcaaggtagaatttttgaagggtatgcgaatgtcctttaattaaacaactgtataagtatgtttaattaaaatgctagaagagcgagaataaccacattagtggataaaattctcgctcttttttatattatttaaacatattaaaaaagtggaatagagccgtattcgtcgtcccaccttgcgttgaacgtagattttcattaagaaaatctctatgttggggatagtagtgtttaaaaatgcttattacaagagtatttcaattcagacatcgactgcattaacataaaaatgactggaacattatcaattgttccagtcattttttatattgatattttaatgttaatttgctacttttttatatcttaaatacataatacctaaaataataaaccaaatgggtgttaagaaaatagcgtttcttgttgttgcatttacaaatagtaaacaaaacacaaatatgaagaatgctaaaataatataggccatatattttccaccaggaagtttgaattttgcttttttatgtaattcaggattttttctatgataattaatataagcccaaataattaaagcccacacgataataaataatactgttgaaattgttgtaacatatgtaaatactagcgttgcatttggaaaaatatagtttaataatgctgtcaccaataataacgcagatgatactataattgcgatatgtggtacaccttgtttgttagtacttttaaatatagaaggcgcttgtttttgttcagataatccaaataacatacgactatttgagaagataccactattacaagatgaagcagcagcagttaaaactacaaagttaattaatccagctgcaaacggaataccaattaatgagaacaatctaacaaatgggctctcatttggatccactttgtcccaaggaataatagacataatgactgctaaagcacctacatagaaaattaaaattctaattggtactgcatctatagctttaggtattgttttttctggatctttagtttcaccagcggttaccccaatcatttcaataccaacaaatgagaataaagccatttggaatgacataaagaaaccagaggttccattggtaaaaataccatgtttataaagattagttaaacttgcatgtccaaattgagttttataagcaaataaaatcattattgcaccaatgacgattaaagctataatagttataattttaataatagcaaaccagaattctaattctccaaataattttgcacttaataagttaaaaaccattaatattaatacgcaaaacagagcagtaatccagtttggtatagttggaaaccagaaactaacatatttagcaactgcagttacttctgccattcccgttataatccagcataaccaatatgtccatccagtaacgaatcctgcaaacggtccaatatactcgtttgttacatcagcaaatgatttaaaacgagtattttgaatgatgatttctccaagacctctcataaacataaatagcatgaatccaataatgatataggttaatagaatagaaggtccagtcatagctatagtttgacctgcacctaagaataatccagttccgatagcgccaccaagagcaatcaattgtacatgacgattacttaatcctctttgtaatttttcttctgccataagacaactcccttacatttaattaatattaattatgcacttatatattaaattcgacaattatttttctaaattttttctaaaaattttattaacattgagttaataaaaaataatcattgttgataaataattaaaatattcattattttcacataagtcaaccttgtcttactattcataaatagctttataacgatttttactatcattataattaaaattaatatataaataatttaccaatgaaaatttaaaccacatatataattattcacaaaacttataattttagatatactattttatgaaagccattacattatgtaaaagaaaaggggaattacttatggcagaattacaaaaaggtttagaaggggttatcgcagcagaaactaaaattagttcaattattgacagtcaattaacttattcaggatatgatattgatgatttagctgaaaatgctcaatttgaagaaatcatgttcttattatggaattatagattaccaacacaagaagaacttgaagaattaaaagagaaacttaaacaatatatgacattaaatccaagggtatataagcattttgaagaatatgctacggatgatgtacatccaatgactgcattacgtacctctgtttcttatattgcacactttgatccagatgctgaagaggaaacagatgaaagtcgaaaaaatcgagctattcgtatccaagcaaagattgcatcattagttacagcgttttcacgcgtgcgagaaggaaaggaacctgttaagcccaattctgatttaagctatgcagcaaacttcttgtatatgttaaaaggggaattgccatctgatactgaagttgaagcttttaataaagctttaatattacatgctgatcatgaacttaatgcttcagcatttacagcaagatgcgcagtatcatctttatctgatatgtattcaggtattgtagcagcaattggttcattaaaaggccctttacatggtggagcaaatgaacaagttatgaaaatgctatcagaagttaaatcacttgatgaagtagataattatttagataagaaactcgctaacaaagaaaaaatcatgggattcggtcatcgtgtatataaagagggagatccacgtgccaagtacttaaaagaaatgagtcgaaaaataacttctgaaactggacataacgaattatatgaaatttctcttgcaattgaaaagcgtatgcatgatgaaaaaggtttaattccaaatgtagacttctttagtgcaactgtttatcatagcatggaaattccacacgatatttttacacctatctttgctgtaagtcgtactgcaggatggaccgcgcatattttagaacaatatcgtgataatcgaattattcgtccgcgtgcaaaatatgttggagaaacaaatcgtaaatatgtagcagtagaagaaagataaaatatttcaaaatttaatttatggaggcttttataatggcagctgaaaaaattactagagcaaatgatgaattattaaatgtacctaatgaaccaattattccatttattattggggatggtatcggtcctgatatttggaaagcagctagtcgtgttgttgatgcggcggttgaaaaagcatataacggtgaaaagcgtattgagtggaaagaggtattagctggtcaaaaagcgtacgatgaaactggtgaatggttaccacaagaaactttagataccatcaaagaatacttaatcgcaattaaagggccattaactacaccaattggcggaggcattcgttctttaaatgtagcattaagacaagaactagatttatttacttgtcttcgtccagtacgttggtttaaaggtgtaccttcaccagtaaaacgtcctcaagatgttgatatggttatcttccgtgaaaatactgaggatatttatgctggaattgaatttaaagaaggaacagaagaagttaaaaaagttattgacttcttacaaaatgaaatgggtgctacaaatattcgttttcccgaaacttctggtattggtattaaaccagtttctaaagaaggaaccgaacgtttagtaagatcagctattcaatatgcaattgataataaccgtaaatcagtaacattagttcacaaaggtaatattatgaagtttacagaaggatcatttaaacaatggggttatgatttagctcataacgaattttctgataaagtatttacttggcaacaatatgatgaaattgctgaaaaagatggtaaagatgctgcaaatgacgcacaacaacaagctgaaaaagacggtaaaattattattaaagattcaatagcagatattttcttacaacaaattttaacacgtccagcagaacatgatgtagtagctacaatgaacttaaatggcgactatatctcagatgcacttgctgcacaagtaggaggaatcggtattgctcctggtgctaatattaactatgagacagggcatgctatttttgaagcaacacatggtacagcaccaaagtatgctaacttaaataaagtgaatccatcatctgaattattaagttctgtattaatgttagaacatttaggatggcaagaagcggctgataaaattactgatgctattgaagctacaattgcttctaaaattgtgacatatgattttgctcgcttaatggacagagctactgaagtatcaacttcagaatttgccgatgaattgattaaaaacttaaaataatatttattttgataaaacagtctaagatggattttgatgtcttagactgtttttgttcattattaataaatatcaaaacaagattaacgaaaaatattcttaacaaattgaaaataataagtaaatgttaagtttatgtaaattcaatatgttgtatgttatttttatttaaatttcagttataataaaattgaaattgttaattctatttagggaggcaaatcatgtcacaaaaagtattagtggttgatgacgagcaatcaatagtaacgttactaaaatataacttagaaacagcaggttatattgtagatgtagcgtatgatggtgaagaagcactcaaaaaagttaaagaggttaaacctgaactgattgtattagatgtcatgttacctaaaaaagatggaatagaagtatgtaaaacgattcgatctgataaaaatcttgtacctattttaatgttaacggctaaagatgatgagtttgatcgtgttttaggcttagaattaggtgctgatgattacatgactaaacctttctctccaagagaagttgtagcaagagtaaaagctattttaagacgctctcaaattgctaatgaagtcgtaaaagatgacgtggaggatgaagatattgtaattgataatattagaattcgtcctgaattctttgaagtctatagagatgataccttgcttgaacttactcctaaagaatttgagttattactttatcttattgaacgtcaaggacgcgtaattactagagaacatatgttaaattcagtgtggaattacgagtttgcaggagattcaagaattgtagatgttcatattagtcatttaagagataaattagaagaaaatcctaaacaacctaagttgataaaaacagttcgtggattgggttataaattagaaagacctaaagcttaatgattaaatttcatcatagattattacttctactatgtacaatcacaattattagttttataggcttaggtgcaattcttcatcatacgatttatcagatattatcagatactcaaactagagaattaaatcatttatcagaaaatatcgtaaatttaaataagcgaaataaacaagcagacattcagcgtatagcacaaaatcaaaatttggttgttaaaatttctgaaaatggacatgtgttatatcaaactggcaatcaacatcaaattaatcatactattgataatgcagctaatccttcgaatattatatatcataaaaacaaggataaggtggattacacatttaaaaatactgtaagtaatcaaacaatatacataagtggtattaatactgaaattttagatttacaaaaaaatatgtggaagtacttatcattaattggaatcattgtgttatttgctatttatttagctgtaagaagcattaatcgcacctatatacgaccaatcaacgaagttacttatgcgacatctttaattgcagatggatattatcatgttagagtacctgaaagtaatgtgaaagaaacaaaagcattatttgttactaccaatgatttagcaagacgattgcaaaaattaaataataaacaaaaaatgcaatctaatcgccttaaaacaacattagaaaatattcctagttcggtattaatgatagataaacaaggtgaaattgttattgcaaaccatgcttattacgaggtgttcaaaccagatagtaaagtcgaaaataaagattatactgtacatttagataaagaaattcaacatcttattattgaaagctttaaaactgaaaaaccgttgcatgaacaaattgagttatacattaatgatgttcatcaaaaatattttgatgtttcttgtattcccattttaagtaaatcaaaaaagaaacttcaaggtatggttgtagtattacatgatatcactaatctaaaaaaattagagaatttgagacgtgagtttgttgcaaatgtttcacatgaacttaaaactccaatcacttcaattaaaggatttgcagaaaccttaattgaaggtgcaaagaatgatgaacaatctcttgatatgtttttaaatattattttaaaagaatcaaatcgtatagaatcacttgtcatggatttattggatttatctcatattgaacaacaaactgagattgagactacttatgttaatctttcagatttagcacataatacaatccataatctacaaactcaagctaagtataaaaatatcgctattaaatctgaaatagaaaatgatgttattattgaagcgcatgaaggaaaattgtctcaagttatcacgaatttactttcaaatgccattaactattcatatgaaaataataaagttattgttagagtttacagagaagatataaaagttaatctagaaatccaagattatggcattgggatagacaaaaaagatcaaaagcatatttttgagagattttatagagtagataaagcaagaagtcgtgactctggtggaacaggtttaggattatcgattacaaaacatattgtagaagcacttcacggtaccattatggtcgaaagtgaactgaataaaggatcgctatttagagtctcatttatagataaaatcgaataactattttgtcctacaagtttaggtcatccacactttaaaatacttttttatgtttttaggattttaaagggacctaaacttgtaggattttattttttgacattcgtaaaatatcgttcagtcgttatgaccaaaggtttatgctaaaatataattaaactcattctggaggtttaaaatttgaataaattagtattgatagatggcaatagtttaagttttagagctttttacgcattgccacttttatctaataaagcaggtattcatacaaatgcgattcttgggtttgccaaattactcgaaaaaattatcagagaagaacaacctacacatttcttagtagcctttgacgcaggtaagactacttttagacattctaaatatagtgaatacaaaggtggacgtcaaaaaacaccacccgaattaagcgaacaattcccctatattcgacaattgttagatgcttatcatattaaacattatgaattagaaaactacgaagcagatgacattattggtacattaagtaaagaagcagatcaaaatgattttgaaactattattgtaactggagatagagacttaacacagttagcaactcaaaatgtgactatttattatactaaaaaaggggtcacagacgttgatcactatactccagaatttatagcagaaaaatataatggtttaaaaccaatacaaattattgatatgaaaggtttaatgggagatagttcagacaatatacccggtgtagctggagtaggagaaaaaacagcaattaaacttttaaatcaatttgattctgtagaaggtgtctatgagaatattgataaagtatctggtaaaaaattaaaagaaaagctcgaacttagtcatgaagatgcattaatgagtaaagagcttgctacaattaatcgctatagtccaatagaagtcactttaaatgatacgaaattaaatgatatcaaggataatcatgaaaaaattgaactttttaagaaattagaatttaaacaattattagcagatatagataatgaagtatctgaatttgagcaagaacaaaaacaagtttcttttgatattttgcctacatttgaatatgttgattttaatcatcttgatgaagcagtgattcatttcgaaatagatggttctaattatttaaaagatgatattttaaagtttggattttatgataaagaacgttatatcgtagttgatgcagataatattaaagattatccagaacttattaaatggttggaaaatgaaaattctaaaaaggtagtttatgatgcaaagaaaacatttgttatagcacacagattaaatattaccattcaaaatatcgtttttgatgcgatgttagcaagctacattattgatccatcacgaacgattgatgatgtctattcggttgtaacaaattatcatcaaacgtatgttaaagaagatgtctctatttatgggaaaggtaaaaagcgacaagttcctaatgctgaaattttaaatacgcatattgcatctattactaaatctattgatgctgttaaaccgttaatggaaaaagaactagaatcacatcaacaaatgaatttactaaaagatttagaacttccgctagcacgtattttaagtaaaatggaagaaattggtatttatacagatgtaaatgatttacaacgcatgcaacaagaattacaagagaagttagaattgttagttcagcgtattcatgatgcagcaggtgaagaatttaacattaattcccctaaacaactcggtgttgttttatttgaaacattaaaactacctgtcattaaaaaaacaaaaacaggttattctacagcggtcgatgttttagaacagttacagaatgaacatcctatcattaatgatattttagaatatcgtcaattagctaaattacaatctacttatgtggaaggtttacaaaaagtcattagtaatgataagcgtatacacactcgttttaatcaaacattagcacaaactggacgattatcttcagttgatcctaatttacaaaatataccgattcgacttgaagaagggcgtaaaatacgtaaagcatttaaaccttcatctgaagacagtgttattttatctgctgattattctcaaattgaattaagtgtcttagcacatattacacaagatgacagtttaaaagaagcatttattcatggacaggatattcatactgctacagcacgaaaagtatttggcgttgaagcggaggaagtcactgatttaatgcgtagacaagccaaagctgtaaattttggaatcgtttatggtattagtgattatggcttaagtcaaagcttaaatataactcgtaaagaggcaaaaatatttattgatgattatttagcaagtttccctggagttaagcaatatatgagtgacattgtaaaggatgctaaagcaaatggttacgttgaaacattattgcatcgtagacgttatattcctgacatcactagtcgtaattttaatttaagaggttttgcagaacgtacagcaatgaacactccaattcaaggaagtgcagcagatattattaaacttgctatggtggaatttgataagcaagttcaacatacgtcttacaaagctaaattacttttacaagtacatgatgaattaatatttgaagtgcctaagtctgaagttgaagaatttagtttatttgttgaagatatcatggagcatgcattagacctagatgttccattaaaagtggactctaattatggtcctacttggtatgatgcgaaatagaaagaggaatgaaaaatgccagaattaccagaagttgaacatgttaaaaggggaatagaaccttttattgtaaatactacaattaaaagtatttcattttctaaaaaagtaattgaaggtaaaagtcagaataaagaaacgattatcaaaggaatgaatttagatggttttcgtttgaattgcgaaggctataagataattaaagtcgaacgaagaagtaaatatattgtttttcatattgaaaagcataatcgtaaacgtgtgttacttagtcatttaggtatggctggtggatttttcattgtcaatcacctatctgagatagcaattcccaactatcgtaaacattggcacgtgatttttcatttaaataatggaaaaaaattagtgttttcagatatacgtcgatttggtgagattagaaatctaaattcatttgaagattatccttcatttttagaaatagcgcctgagccttttgacgaagaagcgttacaacattttaatcactatttatctcaaaaaaaagtagccaataaacctattaaacagatgttattggatcataaaatcgtagcaggatgtggaaatatctatgcttgtgaagcgttatttagagcaggtatccatcctgctagaaaagtaaaagatacgtctcatcaagaaagacaaatgctcttttattatgtacaagaagttttaaaagagggtattgataatggtggaaccagtatttcagattatcgtcatgcagacggaaaaactggacaaatgcaattacatttaaatgtatacaaacaaaagacatgtaaagtatgtggccatgatattgaacaaaaggttatagcatctagaaacagtcatttttgcccatattgtcagaaataaataaagtgagcggtgatataaatgcctaaagtaattggattaacaggtggaatagctaccggaaagtcaacagtttctaaattattatcagaatatggatttaaaattgtcgatgcagatatagcttcaagaaaagcagtagagaaaggatcaactgctttggaacgaataaaagaaacgtttggcgatgaagcaatcacaagtgacggagaaatgaatcgagaatacattggagaattagtatttaatcatccagaaaaacgattagaacttaatgaaattattcatcctattgtaagaacgattatggaacaagaaaagcaacactgtgtacaacagggatatgatgtgattatggatattccgcttctgtttgagaatgatttacaagatactgtggatgaagtttggctcgtctacacatcagaaagtgtacaaattgaacgtttaatgaaacgtaacaatttagacttggatcaagcaaaagcgagagttcatagtcaaatatcaattgataaaaaaagcagaatggctgatcatgttatagataacttaggaagtaaatctgaattagaaaccattcttaaacaactattgattgaaaaaggatacattcatgaataatataaaaaagagtttagggctttattttaagtcttaaactctttttatttatacaataaaatatattagttatataaacttaagatgtaaaagtaaaaaatattacattattttcggtaaacgctttcaatcgaaatctattatgttatactaattttataaagtataacatataaaacaaggggtgctttaaatgtcaacaaatattgcaattaatggaatgggtagaataggaagaatggttttaagaattgcattacataatgaaaattttaatgtggttgcgattaatgcaagctatccacctgaaacaattgcacatctaattaactatgatacaacgcatggacgttatgataaaaaagtagaaccaattgatgatggtatacgtgttgataaccatgacattaagttagtgtcagatagaaatcctgaaaatttaccatggaaagatttaaatatagatatcgtaattgaagcaactggaaaatttaatcatggtgataaagcagttggacatattcgtgctggagctaaaaaagtattactaactggtccatctaaaggtggagaagttcaaatgattgttaaaggggtaaatgatgacaaattagatgttgaaaagtatgacattttcagtaatgcttcatgtacgacaaattgtataggaccagttgctaaagttttaaatgatcaatttggtattgtcaatggattaatgactactgttcatgcaattactaatgatcaaaaaaatattgataatcctcataaagatttacgtagagcacgttcatgtaatgaaagtattattccaacttctactggagcagcaaaagcattgaaagaagttttaccagaattagaaggtaaacttcatgggttagctttacgtgtgcctacaaaaaatgtttctttagttgatttggttgtagatttagaaaaaccggtaactgttgacgaaattaataatgcatttcgtcattcagatttagatggtgttttagaagtagaacatgcacctttagtgtctgtcgattttaatacaaatccacattcagctattatcgatgctgagaatacaattgtaatggatgatcataaggtgaaagtgattgcttggtatgataatgaatggggttattctaatagagtagtagaagtagctgaaatgattggtgaacaactagtagaaaagtctactgtgactgcagtttaagcttttaataaataaaagattgttaattttagagttgatagcctaatctaatgtccttggttttatagattaaaacattataaaaacattaaataattttttaatgagtcatatataggaaagtgaaaaaagaatttatattgaattctatttcactttctttttatattctatataggtttagacagctaagttgtatcaatttattattaatacatatgagttcttttgtcataaatcgtttttatagtataatggagcataatctattcaagagggtgacagatatgaaatgcccaaaatgtagtgccacacattcacgtgtggtagattcaagacatgctgatgaagctaacgcaatacgtagaagacgtgaatgtgagaattgtgggacaagatttacaacatttgaacatattgaagtgagtccacttattgtggtcaaaaaagatggaacacgtgaacaatttttaagagaaaaaatattaaatggccttgtaagatcttgtgaaaaaagaccagttagatatcaacaattggaagacattactaataaagtagagtggcaattacgcgataaaggtcatacagaaatttcatctagagatataggtgaacatgtaatgaatttgctcatgcatgtagatcaagtctcttatgtacgatttgcgtcagtatataaagagtttaaagatgtggatcaattactagcatcgatgcaaggtattttggatgataacaaacggagtgattcataaatgagttttaaatcttatgagtatggtttaagtccacacgatggatttaaagtatatcgacattttttctttaatcatcaacaattagagatattaaatcgattgtacataccgttaattggctttaaagctattggtgtatatcatttcatgaaccaatttatcgatgaagttgaagatactattctcacacattacactattatgaatgagcttaaaataaatttattagaattccgtgaatatatggatttacttgaaggcattgggttaattaaaacatttgtaaaacatgatagtaatcagtctatgtttatatatgaattgattcaacctccaactgcataccaattttttaatgatccaatgttatctatatacctatacaatgaagttgataatcgaagatataaagatttaaaagcgtattttgaaaaaaatgaaccagatttaaacgcatttcaacaagtaacgcgcaaatttactgatgtattcaaagttccacataaaaatatatctattgatgcttcaacaattcaaaaggaaaatcattcagctactatagatttagataatgaatcatttgactttgatatgttgagagatatgttacaacatcattttataagtggagaaattatcactaaagaggcaaaacaattaattttacaattggctactttatatgggttaacgcctacttctatgaaacgaatcattcttaactctatcacacaaaatcaaacgttatcatttgaagagatgagaaaacaagcaaggtctcattacttaattgagcatcaacaacagcttcctaagttacaaactaaagctaatccttctaatcatttagaacaatcacagagtccaaatgagactactgatgatataaaggaaagtgatagttggtttaagttattagaagacacaagtcctatcgatatgttagcgtcttggtcagaatcagaaccaactttacaacaaaaaagaatggtagaagagttaatagagcgtgaaaaattgtcatttggtgtaattaatattttattacaatttgtaatgcttaagaatgaaatgaaacttcctaaatcctatatatttgaaatcgcttcaaattggaaaaagttaggtattaaaactgcacaacaagcatacgattatgcgctgaaaacaaatcaacaaatcaatgatagtataactaaaaaaacaaaacgtcagtataaacaacgtgacgttgcatcgatagaaaaaacaccaaagtggttaaaaaataaaaatcaacaagatgaaaaaccaaacaataatgatgcgcaatttgaaaaagatagagaagcgtttcgtgctcaattagaacaagattgggaggattagatgaaaccatttagtaaacttataaaaaatcaagataatttaaacaaaagaattgctaaaataaaaaatcaagtcattaatgattctgatgttaagcaatttttaaatcaacaccagtcagaacttactaatgaaatgattgataaagatttaaatgtacttcaagaatataaagatcaacaaaaacactacgatggtcacgattatgcacattgtccaaactttgttaaaggtcatattccagaattatatatagaaaatgagcgtattaaagttcgttatcgattatgtccttgcaaaattaaatacgatgaagaacgtttaagttcacaactcattactgcccatcacatgcaacgagatacgttgaatgcaaaagttaaagatatctataccaacgatagaagtcgacttgaaatagcgatggaagttaacgatatttgtaaaaagttagttaacggtgaacgcgttaagggtctttatatacatggcccatttggaacaggtaaatcttttattttaggagcgatcgcaaaccagcttaagtcaaaacatgtgccatctacaatagtatatttacctgaatacattcgtatactcaaaggtggttttaaagatggaagttataatgaaaagttagagcgtatacgagaagcaaatatattaatgttagatgatatcggagctgaggatgtcacaacttgggtaagggatgaggtaataggtcccttattacattatcgtatggttcatgaattaccaacattctttagttcaaatctaaatttggaagaattagaacatcatttatctatttcaaacaaaggggcagaaataacgaaagctgctcgaattatcgaacgtatcaaaagtttagcaaatgaattttatttagatgggaaaaatttacgaaataattgaaatttacaatgtgtgatgtataataaagataaatctaaatcgttgaaataaatgaagatatggtaatttaatctctatcatacagcaagccaacaattgatgagaatttggttgatatattaaattattactccttcatatttagatgctggtaatcagtatccggctcaagaccgttatcttatgaagagatatctagaatacatctagataactagggtggtaccgcgacgaactcgtcccttttatagggaggagtttttttattttcttcagcgatcatagaataaaatttatggagggtttcgatatggaacaaattaatattaagtttccagatggcaattcaaaatcatttgacaaaggaactactacagaagacattgcacaatcaattagtcctggacttcgaaaaaaagcagtagcaggaaaatttaataatcaactcgttgatttaacttgtccacttgaagaagatggggcaattgaaattgttacacctggtagtgatgaagctctagaggtattacgtcattcaactgctcatttaatggctcaagcattaaaacgaatttatggagatgttaaattcggcgttggcccagtgattgaaggtggtttttactacgactttgatatggatgaaaaagtatcatcagatgactttgaaaagatcgaaaaaacaatgaaacaaattgttaacgaaaattataaaattgaacgtaaagtggttactcgtgaagaagcaaaagatttctttaaagatgatccatataaattagaattaattgatgcaattcctgaagatgagaatgtaacattatacagccaaggtgaatttacagatttatgccgtggtgttcatgtaccatcaacttcaaaaattaaagaatttaaactgctttctactgcaggtgcatattggcgtggagatagtgacaataaaatgttacaacgtatatatggtactgctttctttgataaaaaagatttaaaagcacatttagaaatgttagaggaacgtcgtgaacgtgatcatcgtcgtattggtaaagatttagaattatttacaaataatcaacttgttggtgctggtcttccactatggttaccaaatggtgcaacaattcgccgtgaaattgaacgttatattgtagataaggaagtaagcatgggatatgatcatgtatatactccagttttagctaatgttgaactttataaaacttcaggtcattgggatcactatagagatgatatgttcccaccaatgaaattagatgaaactgaagaaatggtattacgtccaatgaactgtccacatcatatgatggtttataataataaaccacattcttatcgtgaattaccaattcgtattgctgaattaggtactatgcatagatatgaagcaagtggtgcagtatcaggcttacaacgtgtaagaggtatgactttaaatgattctcatatctttgtgcgtcctgaccaaattaaagatgaattcaaacgcgttgttcatatgatacaagatgtctatgaagactttggttttgaagattacactttcagattaagttacagagatcctgaagataaagaaaaatatatggacgatgatgacatgtggaataaagctgagtctatgcttaaagaagcagtagatgaaatgggcttaccatatgttgaagccattggagaagcagcattctatggccctaaattagatgttcaagttaaaactgcaatgggtaaagaagaaaccctttcaactgcacaacttgatttcttactacctgaacgatttgacctttcttatattggtagtgatggtgaaaatcaccgtcctgttgttattcatcgtggcgtagtttcaactatggaacgttttgtagctttcttaactgaagaaactaaaggtgctttcccaacatggttagctccaaaacaagttgagattattccagtaaatgtagatttacattatgactatgcgagaaatttacaagatgaattaaaatctcaaggtgttcgtgtagaaattgatgatcgtaacgaaaaaatgggctataaaattcgagaggcacaaatgcaaaaaattccttatcaaattgtagtaggagataaagaagttgaaaacaacgaagtaaatgttcgtaagtatggctcacaagatcaagaaacaatagaaagagatgaatttatctggaacttagtagatgaaattcgtctaaaaaaacgtagatagtcttgataaaataatattcttaatgtatattacaaagtagttaaataaaaatgagttagaggttgcatctttaaaaagtaatacttcagaagttgatatggaacgtatgttgaaagtatgaaaggtaaagatgccgaaacaaatgataaccatacttatgatttgttgggacagttatcgaatagaaactgtactgtcacagtttgtgatgtgctaccgatatagattaagtaatgggtgcatatcttaacggtatgtacctattttttaatttgtaatttgatttacatatcatttataaaaattaaatatgttaattatcttcacataacaaataaatacttagctaacctctacattaagaaagggagcttatatgagtaaagttgaaaatcaagatagtggtatgaagagagggttaaaagatcgtcacatctccatgattgcaatgggaggctgtattggtacaggcctatttatgacctcaggtggtgctattcacgatgccggtgcattaggtgcgcttattgcatatgcaattattggagctatggtattctttttaatgacttctttaggagaaatggctacgtatttacctgtttcgggttcatttagtacctatgcaacacgatttgtagatccatcattaggattcgcattaggctggaactattggtttaactgggtaattactgtagcggcagatgtaactattgcagcgcaagtcattcagtattggacacctatggcagggataccagcatgggtatggagttgtatctttatagttattattttcgcattaaactctttatctgtcagagtatatggtgaaagtgaatattggtttgcacttataaaagtgattacagtaattatttttataattattggtattttaactatattaggaattatgggtgaacattttgtaggatttgagacatttactaaaggtgatgggccaatcctaggtggaaatcttggcggtagtttactttcaattctaggtgtattcttagttgctggtttctccttccaaggtactgaattaataggcattactgctggagaatctgagaatccagaacgtgctgttccaaaagcaattaaacaagttttctggagaatattattattttacattttagccatctttgttattggtatgttaattccttacaatagtaatgcattaatgggtggagataacgatgttgcaacatctccatttacgcttgtctttaaaaatgcagggttagcattcgctgcttcatttatgaatgcagttattttaacctcagtattatcagctggtaattcagggatgtatgcatcaacacgtatgttatattcaatgagtaaagataaattagctttcgcttcatttggtaaaacgaataaacatggcgtgccatatttatcattgattgctactggtgtacttgtagtcgttattttcttagtacaaaaattaagcggaaatgcttatgaatatattgtagctgccagtggtatgacagggtttattgcttgggtaggtattgcagtaagtcattatcgctttagacgagcatttaatgttcagcatcatcgtaaatcagaattgaaatataaagcgaaatggttcccattcggtccaatatttgcaggtatattgtgtgtgattgtgattgttggacaagatgtagatttcattaaaacagggcactttgatcttaatcgatttattattacgtatatgggtattccagtatttttagtattctttatttatcataaattaagatataaaactaaaaaaatacctcttgaagaagttgatttaagccaagatgtctcaatgaatgaagtaaaacatcactaattttaaaaaacaattgacatgcttaataaaacttgatatgattagtatcgttgattacgaaacgaaccaagtagaaacacccgtttctcacctgtagcgacgcaaaaagctgttggcaggttaatcatgtcacacaattattgtgtatgagtgaagagcgggcaaatattgtccgctctttttgcttgggaaaatttcgtaaaattttgggaggtgtcaaccatagcaaaagatcaaacgcaagttaacgaaaaaattcgcgcaaaagaattacgtttaattggccaaaatggtgaccaaattggtgttaaatctaaaagagaagctcttgagatggctgaaagagttgaattagatttagtagttgttgcaccaaatgctaaaccacctgttgcaagaattatggattatggtaaatataaattcgaacaacagaaaaaagaaaaagaaatgaagaaaaaacaaaaagttatcaatgttaaagaaattcgtttaagtccaactattgaggaacacgattttcaaactaagttgaaaaatggacgtaaattcttaactaaaggtgacaaatgtaaagtttctattcgtttcagaggtcgtgcaattacacacaaagaaattggtcaacgtgttttagaaaaatttgcagacgaatgtaaagatattgccactgttgaacaaaaacctaaaatggaagggcgccaaatgtttattatgttagcgcctataaacgaaaaataatttacttttattaggaggaaatgaatcatgccaaaaatgaaaactcaccgtggagcagctaaacgtgttaaaagaactggttcaggtcaattaaaacgttctagagctttcacatctcacttatttgcaaataaaaatactaaacaaaaacgtaaattacgtaaagctaaactagtatctaaaagcgatatgaaacgcgtaaaacaattattagcttacaaaaaataattaatattactttcgaacgatgataaagcgatatatttaaggaggaatttaacatgccacgagttaaaggtggaacagtaacaagagcacgtcgtaaaaaaacgattaaattagctaaaggttacttcggttcaaaacatacattatataaagtagcaaaacaacaagtgatgaaatcaggtcaatacgcattccgtgaccgtcgtcaacgtaaacgtgatttccgtaaattatggattacacgtattaatgcagctgcacgtcaacatgacatcagctattctcgtttaatgaacggtttgaaaaaggctgacattaacattaaccgtaaaatgctttctgaaattgctatttcagacgataaagctttcggtgaattagtatcaaaagctaaagatgctttaaaataattaatatttaaaagccaataaggtaactataaaaccttattggcttttttatttacttttattcatcaaatattctttaatagaattatgataagtaaacgaaccagttaaatatcattgtgatttaaatcattggtttgttaaactattaaaaaagaatattaatttcaaggagttaactatgtctaaatttgatgaacaaatcatcgtcgtatcaagagaattattatttgataatgaaaaaaatgcatttaatggattcttatcgaaaaacgatgttcaaggtgaagaaatatttaatacgtttaaaaactatgaagtaaaaagacgtggagatatggaagaagatccatcttataaacaacttatttcatattgtcttttagaaaatgaaaatgatgaaatcttagtatatcaacgtttaagtggtggcggagaagaacgcttacacggacagtcttcagtgggtgttggtggacatatgaataatgttgttggtgccgattcaattaatgaagttttaagagtgaatgcacaaagagaacttaatgaagaagtaggattatctgaagatagatctcaaaatatggaatatattggttttattaatgatgatactaatgcagtaggtaaagttcatataggtgttgttttcaaaattaaggtgaaatctagtgatgtagaagttagagaaactgacactttaaaaattaattgggtatcacaagatgaaataaatgatttaaatcattttgaatcatggagtgcgttaattttaaaagatttaaaataaagggggctcaatatgtctgatattatcccttttcctcaatcaaagcaaaaattatatcataatattttaaatgcacaacaacaaaataaatataaagaaatgtatcaattgtttgatatatatgaagcctcattcgagttagataatcaattatctttgattaaatgtgacatgttaaatgaattagggttatatttagaattaagagaagaagcaattattttcttaaaaaaaggtatacctcattacgacgaactaattattttctatattaaagcattaataggtttaaatcagaattatgaagcaattgaagtcattaatcaaatcattaacgaagtgaaagaacataaaactagaatggcactctttccattaaaagaatatgcccaatctaaattagatgaagacaagaaactttctagtcaattattatcagaatttactagtttagatttaaatcgtcaaactaaattaatgattaaactcattgataacggacattatgaattcagaaagacggttgcttttttattatctaatcaagtagaatcttataatttaaaaagtctcatgcttgagtatttacgtttttcaaattatgatagtgaaataaaaattgagaagtatggttatgaagtcaacatcctccctacaacattaaaaggtttagaacacacagatatgaaaactactgttattcccaaagttctcaatagattagaaaatggagctttgaatatacaaaatgaagctcagtatgtgatgaataatcattcaataaaactatatccacttgatatattttcactttttaatgaagaagattggataatagcttatgatgtttattttaagtcaatgattggtatagaagtaagtgaagcaaatcaagaattattaacattaatttatcagttagataattaaatgtgagcaaatcattttagtttacttaaatgattctgtaaagttgaattactatttaaaatcccctataaaacattgtttgtgtccatattggacctatgatataatagggaagttgaaaaaattaaaaatgtaagcatggaggtatttatacatgacagcaacttgggaaaaaaaagaaggtaacgaaggtttattaaaagttactgttccagcagaaaaagtaaataaagcattagatcaagcatttaaaaaagtggttaaacaaattaacgtgcctggtttccgtaaaggtaaagtgcctcgtccaattttcgaacaacgttttggcgttgaagcattatatcaagatgcagtagatattcttttacctgaagcttatggtgaagccattgaagaaactaaaatcaatccagtagctcaacctgaaattaatgtaactcaaattgaaaaaggtaaagatttcgaatttgaagcaacagtgactgttgaacctgaagttaaattaggagattataaaggtcttgaaattgaaaaacaagattctgaattaactgatcaagatttacaagatgaaattgatcatagtttaggtcatttagctgatatggttgttaaagaagatggtgcagttgaagaaggagacactgtaaatattgactttgatggttatgtagatggcgaacaatttgaaggtggccaagctgatggttatgatttagaaatcggttcaggttcatttattccaggatttgaagatcaattagtaggcgttaaaactggagaagaaaaagacgttgttgtaacattcccagaagaatatcacgctgaagaattagctggtaaagaagctacattcaaaactaaagtaaatgaaattaaatacaaagaagtacccgaattaactgatgaaattgcaaatgaattagattcagatgctaattcagtagatgagtataaagaaaacttacgcaaacgtttatcagaacaaaaagcacaagatgctgaaaatgtggaaaaagaagaagcaattaataaagtaactgaaaatacaacaattgatattccacaagctatgattgacactgaattagatcgtatggttcaagaatttggtcaaagaatccaacaacaaggtttagacttacaaacttacttccaaatttctggtcaagatgaatctcaattaagagaacaaatgaaagatgatgcagagcaacgtgttaaaacaaacttaacattatcagcaattgcagatgaagaaaatatcgaagtcacagatgaagatattgataaagaattagaaaaaatgagcagtcaatttaatatctcagtagaagatattaaacaaactcttggtaatactgatatcattaaaaatgatgtacgtattcaaaaagtaattgacttattaagagacaatgctaaatatgttgattcagctaaagaagataaaaaagaagacaaataataaacttttaaattgatataaagtttaaaaataagtagcaggtgcatcattatatgtatctgctactatatgttttaagcattttagttgttaactatcaatttgcattgtagaatgctatctagtatagtcgtttaaggatagaggtgtaaatgaatgtttaaatttaatgaagatgaagaaaatttaaaatgttctttctgtggtaaggaccaagatcaagttaaaaaattagtagcaggtagtggtgtatacatttgtaatgaatgtatcgaactatgttctgaaattgttgaagaagaattagctcaagctacttcagaagaatttactgaattaccgacgcctaaagaaattatggaccatttaaatgaatatgttattggccaagaaaaagctaaaaaatctttagcagtggcagtttacaatcattacaaacgtattcaacaattgggtccaaatgaagatgatgttgagttacaaaaaagtaatatcgccttaattggaccaacgggtagcggtaaaacattacttgcacaaacacttgctaaaacattgaatgtaccatttgctattgcagatgcaacaagtttaactgaagcaggttatgttggtgatgatgttgaaaatattttattacgtttgattcaagctgctgattttgacattgataaagcagaaaaaggaattatttatgtagacgaaattgataaaattgctagaaaatctgaaaatacatcaattacgcgtgatgtttctggtgaaggcgtacaacaagcattacttaaaatcttagaaggtacaacagcaagtgtaccacctcaaggtggccgtaaacatcctaaccaagaattgattcaaattgacacaactaatattctatttatattaggtggtgcgtttgatggtattgatgaagtcattaaacgccgtttaggtgaaaaagttatcggttttgctagcaatgaagcagataagtatgatgaagaagctttattagcacaaattcgtcctgaagatttacaagcatatggtttaattccagaatttattggacgtgtaccaatagttgctaatttagaaacattagatgttgaagcgcttaaaaatattttaacgcaacctaaaaacgcgttagttaagcaatatacaaaaatgttagctcttgataacgttgaattagaatttactgaagaagctttggcagcagtcagtgaaaaagcaattgaacgaaaaactggagcacgtggattacgatcaattatagaagaatctttaattgatattatgtatgatgtaccttcaacaagtgatgttgctaaagttgtagtaactgctcaaacaattaatgaggaaatcgagcctgaaatgtatgattcagaaggtaatttattgaacggtactaaaacttcagcttaattatcaaccatataataaggaagtggtgatagaattcatttgagttcgaaactgcttccttatttttatacatatcatttttttaaaattttagatttttaaacatttatattataataaagcagctataataatgaagaggtgtttgaatatgaatattaacccaaataatatagaattaatgattagtgcagtgaaagaagaacaatatcctgaaaccaatttaactgaaatcgctttaagtggacgttctaatgtgggtaagtcctcttttattaatagtatgattggtagaaaaaatatggctcgtacttcacaacagcctggaaaaacgcaaactctaaacttctataatattgatgaacaacttatttttgttgatgttcctggatatggatatgcaaaagtaagtaaatcacagcgtgaaaaatttgggaaaatgatagaagagtatttaactaaacgagaaaatctaggtttagtcattcaacttgtagatttacgacataatcctaccgaagatgatgtattaatgtataattatttaaaacatttcgatctgccaacactagtcatttgtactaaggaagataaaattgcgaaaggtaaagttcaaaaacatataaaaaatataaaacaaaaattagatttagatccaaacgatacaattataagttactcttctattcaaaattctaaacagcaatacatttgggatattattgctaattatataaattaaaagaaatatcttgtaattaagtgacgaaattttgacttcacattagaatgtttctaatttatttgagcatcaaacttaaattcattctaaaatgtgttatactaacgatattgttagtatatggagggcgttataaatgcattttattgctattagcataaatcatcgtactgctgatgtagctttaagagagcaagttgcttttagagatgatgccttacgattagccaatgaagatttattcgaaactaaagcaattttagaaaatgtaatattatcgacatgtaatcgtacagaagtatatgctgtagtggatcaaattcatacaggacgatattatattcaacgatttttagctcgttcatttggatttgaagtagatgatattaaagcaatgtctgaagttaaagtgggggacgaagcagtagaacatctattgcgtgtaacttcaggtttagattcaattgtgttaggagaaacacaaattttaggccaaatgcgtgatgcatttttcttagcgcaagatttaaaaacaactggaactatctttaatcatctatttaaacaagcaattacttttgctaaaaaagcacataatgaaacagatatcgcagataatgctgtaagtgtttcatatgctgctgtggaattatcaaaaaaagtattaggtaaattaaaaaataaacatgctgttattattggtgcaggtgaaatgagtgaattgtcgttattaaatttactcggctcaggcattaatcatattacaattgtaaatcgaacagaaagtaaagctagaattttagctgaaaaacatcaagttagttatgataagctagaatctttacctagtttattaacttcaactgatattgttattagttctactagttcaccagattatattattactaaaagtatgattaatcaggcactatcatatagaaaatctaaattattattattagacattgcagtaccacgagatattgaaccatgtcataatttaagtgatgacgtatttaattatgatgtagatgatttaaaaggtttagttgatgctaatttaaaagaacgacaaatggcggctgaagctatttctaatgaaattcctgctgaaattaaagcacataatgattgggtaaatatgttgggtgtagttcctgtaataagagctttacgtgaaaaagcaatgactattcaagctgaaacaatggatagtatcgatagaaaattaccgaatctatctgaacgagaacgaacagtcatttctaaacatactaaaagtattattaatcaaatgttgaaagatccaattaaacaggctaaggaattgagtaacgataaaaaaagtaatgaaaaattagagctatttcaaaatatatttgatattgaagccgaagatccttataaagcagtgaaagaacgaaaaaaagaaaaggaactttcagtacgacatatctttagttttgaataagcatattaaaatggtgataatatgcaagaaacgctatttattagatttcatgaaattatattaattgtatatttaattagcattctttgttattttatagactttgttcggaagagtcataagattagagtacttggaatttatgccttagggattgtttggtttttacaaacaatctctttgtctatgtatattacttcgcatagtgatgtattgtttaattccatatttgatgtttttttcttcttgtcatggatgattatttctatttctctagttttaaatattattaaagttctaagtttttctgtgttttttttgaatgtaattggatttatcttattaacgatgaatacatttagacctgaacactatacaaacagtatacaaaaagtacaagttataaatgaattattacttgtacatgtagggcttgcagtattgagttatgctttttttgcacttgcatttgtaaatgcattgctatatatcattcaatataaaaaccttaaagaaaaaaactttaatcagaaatattttagaattggcagtgtagcaactcttgaaaaaattatatttttttcaactttgggcggtttagtaatattaatattgagtgtaattttaattgctcaatggggaatctatgcggttggtatagcaatatttaaagatccgaaggttatgttgtctgtcattattacgcttctttatacagtatatatcgttatgtatttaaaaaagaaaatcatctcaattaatttaatttattttaatattatgatattttgcctatgtatggtgaatttattcttcactactcattttaattaaaagaaaacttatgtaggaggccttgtttatgcgtaaattagttgtgggttcacgtagaagtaaacttgctttaacacaaagtaaacaattcattgataaattaaaagccattgatccatctttagaaatcgaaattaaagagattgtcacaaagggagatcgaattgtgaatcaacaactatctaaagttggaggaaaaggcctatttgttaaagagattcaaaatgaactatttaacaacgatatcgatatggcaatacactcattaaaagatgttcctagtattattccagaaggtttaacattaggttgtattcctgatagagaaataccatttgatgcctatattgccaaaaatcacgtaccattagaagaacttcctaagaatagtatagttggtacaagttcattaagaagaggtgcacaaatattatctaaatatcctcatctaaaaattaaatggattcgtggtaatattgatacacgtttaaataaattagaaacagaagattatgatgcgattattttagcagcagcaggactcaaacgtatgggttggtctgatgacgtagtaacaacttatttagataaagacacattactacctgcaatcggtcaaggtgctcttggcattgagtgccgtagtaacgatattgaacttctcgagttacttcaaaaagttcacaataatgaagttgcaaattgtgtaacggccgaacgaacatttttagctgcaatggatggaagttgtcaagttccaattggtggatatgcgaattataacaataacaatgaaattgagtttacaggcttaatcatgacaccagatggtaaggaacgttatgaacatactgaagtaggaactgaccctgtaaaattagggaacagagtaagtgagatacttaaagaacaaggtgcgtatgaaattataagaaaattaaacgaagaagcatcacattaatactaaatcttagtagaggtgttacagttagatgaaaccagtgatagttatgacgcaaacgagtaaagtacagagtgatatggtagaagtcattcataagccatttattaaaattcaatcacttgaatttgatactcaactcttgcatgataattatgactggcttattttttcttcaaaaaatgccgtacatttattttataaatatttagagtacgtgaatgtaaaacatattgcagtagtaggcgctaaaactgcgcagttatgtaaacaattaggtataaatatagattttatacctaacgattattctcaagaaggtttattagaaggattaaatctagaaaaatcttctattttaattccgagcagtgcacaggcaagaccaaaattgcaacaaactctcgctgaacataataatgttgtgaaaattgacttgtatacacctatagcggatagagagaatattattgaagttatcaatctaattcaacataatcaagttgaagcattaacattttcaagttcatctgcagtgcgttattattttagtgaggcatttcctaagcattttaaaaattactatgctataggtcaacaaactgcaaatagcattagagcctatggttatgaaccttatattgcagataaacaaacttctgaagcattaataaacacatttttagaaagtaggaataaataatgaaattcgatagacatagaagattacgctcttcagctacaatgagaagtttagtaagagaaaatcatgttagaaaagaagatttaatttatccaatttttgtagtagaaaaagataatgttagaagcgaaattaaatcgttacctggtgtatatcaaataagtttaaatctattagatgatgaaattaatgaagcatatgatttaggtattagagcgattatgttctttggcgtacctaatgaaaaagatgatgtgggttctggtgcatacgatcataatggcattgttcaagaggcaacacgtagagcaaaaaaacttcataaagatttattaatcgttgctgatacttgtttatgtgaatatacggatcatggtcattgcggtatcattgatgatcatacgcatgatgttgataatgacaaatctttaccattattagttaaaacagcaatttctcaagtcgaagctggcgctgacattattgctccaagtaatatgatggatggttttgttaccgaaattcgacaaggtttagatgaagctggttattataatattccaattatgagctatggcattaaatatgcttctagtttctttggaccatttagagatgctgcagattcagctccttcatttggagatagaaaaacgtatcaaatggatccagctaatcgtttagaagcactaagagaattagaaagtgacttaaaagaaggcgcagacatgatgattgtcaaaccagctttaagttatttagatattgttagagatgtaaaaaataacactaatattcctgttattgcttataatgttagtggtgaatatgctatgactaaagcagcatctcaaaatggttggatagatgaagaacgtgtggttatggaacaaatggtatcaatgaaacgtgcgggcgcagatatgattattacttatttcgcgaaagatatttgtcgttacttagataaataatggttaaggaggaacaagttaatgacttatgaaaaatcacaagaagcaatgcgcattgctgaaacacttatgcctggtggtgtcaatagccctgtaagagcatttaaatcagtagatacaccagcaatttttatggatcatggtgaaggttcgaaaatttatgatatagatggcaatgaatacattgattatgtattaagttggggaccattaattttaggtcataaaaataaacaagtcattagtaaattacatgatgctgtagataaaggcactagttttggtgcttcaacactagaagaaaataaattagctgaacttgttattgaaagagtgccttcaattgaaaaagtaagaatggtttcttcaggtactgaagctactttagcggcattaagactggctagaggttacactggtagaaataaaattgttaagtttgaaggatgctatcacggacatagcgattcattgcttatcaaagcaggttcaggtgtagcaactttaggtcttccagattcaccaggagtacctgaaggcacagctaaaaacacaattacagtaccttataatgatttagatgcgattaaagtagcatttgaaaattatggagatgatattgctggtgtgatagtagaaccagttgcaggaaatatgggtgttgtaccccctaaaaaaggtttcttagaaggattaagggaagtcactaaagaatatggttctttacttatctttgatgaagtcatgacaggtttccgtgtagggtataactgtgctcaaggttattttggtgtgacaccagatatcacatgcctaggaaaagtgattggcggtggcttacctgtaggtgcttttggaggcaaaaaagaaattatggataaaattgctccagtaggtaatatttatcaagcgggaactctatctggtaatcctttagcaatgacaagtggttatgaaacactaagtcaattaacgcctgaatcatatgagtatttccaagaattaggcgatatattagaaaaaggacttaaagaggtatttgctaaacacaatgttcctattacagtaaatagagctggttctatgattggttatttcttaaataaaggacctgtaaccaactttgaagaagcgaatcaaagtgatttagagttatttagtaatatgtatagagaaatggctaaagaaggcatatttttaccaccttctcaatttgaaggaacattcttatctaccgcacataccaaagaagatattgaaaaaacgattcatgcttttgataatgcattaagtagaattgtttaatatttaaaagttaatataataaaagtggaacaaagatgagataatatcattgttccactttttttaatttaaatgcttttaatctagaaagaagtgatgatttttgaggcgaatttggctaaataatattatattattaataatagcgatgattatgagtttaatattaaaattatctcatatgcttttaccctttatgtttgggcccattatagcctcaattattgtggttaaagtactaaaactaaatattaaatggcctttttggattagtcagattggcttaatattacttggagtacaaataggatctacgtttacgtcacaagtcattaatgatatcaaaaatgagtggttaaccattgtgacggtgactgttttactcatcacgttatcattattgattgcttattttttcaaaaaaattgcaagagttaatactgaaactgctatcttgagtgtaatacctggcgctttaagtcaaatgttaattatggctgaagaagataaaaaagcgaatatcttagtagtaagtttaacccaaacttctagagttatttttgtagtcgtacttgtaccacttatttcttttttatttagcaattcatcatcaagtgaagagacgattcataaagctacaccattaacaagagctttaaatgtgccccaaattgctttaattatgattgctatagcttttgtttatttcttaatgtcaaaaataaattttccaacaaaacaattactcgctccaattgtcgttttaattgtttggaatttatcaactcatctgacttttactttagataattatattcttgcttttgcacaagtgatttatatgattagaattggtttacaaattgcacatttattaggtgatttaaaaggtcgcattgctatagcaattatgtatcaaaatataagtttaattttaggatcatttttgatggtctttattgttcatttgtttactcataattcattaaacgaattatttttaggtggagctcctggaggtatgagtcaaattgtactagttgccatagctactggtgcagatgttgctaagatatcaagttttcatatctttaggatattttttatattatttttagtagcaccaataattaattactttttaaaacgaaaaaaaagtgataatcaatcataaggagtagaactacgaattcaaaataatctgttctactccttttaatatttaatgattaggttttgaaggacatccttctaagtgagcatcatatagaccagccgcttccataaacgagaatacagtcacaggtcctaaaaatttaaaaccataagcttttaaatcttttgaaagttgttttgctctttcatcaactgtaatacgttctgagggagttttatagtgcaagtcaataggatgtccatcaacatatgaccataaaaacttactgaagctaccatattctttttcaatttgtaaataacccttagcttgagatactatggcttctaatttctttctattatgtacgatatttggaaaggtcattaaagcattaatatctttctctgtcattttagaaatttttataggatcaaattgatgaaatgctttttcataagcctctttcttttttaatatagttaaccaagataaaccagcatgttgagattcaagtgcaagtaatttgaaaagtgaaagactattaaaatctggttgtccccatactttattatgataatctaaataaatagggtctgtagttccaaaggcacatgcgttcataaatattcctccaaaagattgacttatcattgttttctattatactattaattagtaattaaatatattttttgggaagagtacgtttgatacttatcaaagagagcatatggacggtgtaaatatgtataatgatcaaactgaaggtagcccacaagttcttttattgaatacacatataatagtagatagaagcgtgtatgagcgttaatcataaataagtgcaagaagatatggaggtatcgtcttgaatttaggtggtaccacggagcatccgtcctatatattaggaaggatgcttttttattttaggaggttatttcaatgaaaatggaatcaaagtataatcctcgtgaagttgaagcgggacgttatgaagaatgggtaaaaaatgaatactttaaacctctagaagatgaatctagagaagcatatacaattgttattccgccgccgaatgtgactggtaaattacatttaggacatgcttgggatacaacattacaagatattattactcgaatgaaacgtatgcaaggatacgatacgctttatttacctggtatggatcatgcgggtattgcaacacaagctaaagtagatgctaaattaaaagaacaaggtatttctcgtcatgatataggacgtgaaaaatttttagaacatgcttggtcttggaaagaagaatatgcatcttttattcgtaaacaatgggctaaattaggcttaggtcttgattatagtagagaacgttttactcttgatgacggcttaagtaaagcggttagaaaagtatttgttgatttatataataaaggaattatttatcgtggagagcgaattataaattgggatccagtcgcacgtacagcattgtcagatatagaagtgattcatgaagatgtgcaaggtcatttttatcattttaaatatccttatgctgatggtaatggatatattgaaattgccacaactcgtcctgaaacaatgttaggggatactgctatagtcgttaatccaaatgatgaacgttataaagatgtcataggaaaaaaagtgattttaccaattataggtagagaattaccaattttagcagatgagtatgttgatattgaatttggtagtggagctatgaaagttacacctgcacatgatcctaatgactttgaaattggtcagagacatcatttagaaaacattatcgtaatggatgaaaatggaaaaatgaatgacaatgcatctcagtatgctggtttagaccgtttcgaatgtcgtaaaaaattagtagaagatttaaaagctcaagatttagtgattaaaattgaagaacatatgcattctgtaggtcattcagaacgttctggtgcagtagtagaaccttatttatctacacaatggtttgtaaaaatgaaaccacttgcgcaacaagcactagataatcaaaaaacagataatcgaattgatttttatccaccacgttttgaaaatacatttaatcgttggatggaagaaattagagattggactatttctagacaattatggtggggtcaccaaattccagcttggtatcataatgaaacaggtgaagtatatgttggagaagaagcacctgctgatatcgaaaattggactcaagatgaagatgtgttagatacatggttctcaagtgcgttatggccattctcaactttaggttggcctaatgaagaagcaaaagattatcaacgttactatccaacgaatgttcttgtaaccggttatgatattatcttcttctgggtagcaagaatgattttccaaggattagaatttactggtaaacgaccatttaatgatgtacttcttcatggtttagtaagagctgaagatggtcgtaaaatgagtaaatcacttggtaatggtgtagatccaatggatgtcatcgaaaaatacggagcagatagtttacgctacttcttagcaactggttcttctccaggtaatgacttacgttattctaccgaaaaagttgaatctgtatggaactttattaataaaatttggaatggtgctcgctttagcttgatgaatattggagaagactttaaagtggaagacattgatttatctggtaatttatctttagcggataaatggattttaacacgactaaatgaaacaatagagaccgttactaatctgagtgaaaaatatgaatttggtgaagttggacgtgctttatataactttatttgggatgaattctgtgattggtatattgaaatgagtaaaataccaatgaatggtgaagatgaagctcaaaaacaaacaacacgttctgttctaagttatacacttgatcaaataatgagaatgctacatccatttatgccatttgtaactgaaaaaatttggcaaagtttaccgcatgaaggagaaacaattgtaaaagcagcatggccgacagttaaagaagagtttgtgtttgatgaaagtaaacagacaatggaacaattagttgaaattattaaatctgtgagacaatcacgcgtagaagtaaacacaccactttctaaatcaatccctattctcattcaagctaaaaatgaagaaattaaaacaatcttagaaaaaaatgcggattatattcatagattttgtaatccaagtgaattaaccattgatacaaatgtagatattcctgaaaaagcgatgacagcggtagtagttgctggtaaagtcattttaccgttagaaggacttattgatatggataaagaaattgaacgtttagagaaagagttagacaaacttcaaaaagaattagaccgtgttgataaaaaattatcaaatgagaattttgttaataaagcacctgaaaaaattataaatgaagagcgcgaaaaacaacaaaaatatcaagaaaaatttaatggtgttaaaaacagaattgaacaattaaaagcataggagaattgtcaatgaattacctagatagcttatattggatacatgagcgcactaagtttggtattaaacctggtgttaaaagaatggaatggatgcttaaccacttaaataatcctcaattaaatattcgcggtattcatgtgggtggaacaaatggtaaaggttctacagtagcttatttaagagctgcattagttgagaatggatatgaagttggaacatttacttctccttttattgaaacgtttaatgaacgaattagtttaaatggttatccgatctcaaatgacgaaatagttgaattagtaaagcgagttaaaccagtaagtgaagcgttagaacaagaaaccgaactcggttctgcaacagaatttgaaattataacaataatgatgtttttatattttggagagatacatcctgtagattttgttattgtagaagcgggactaggaattaaaaatgattcaactaatgtgtttactcctattctttcaattttgacaagtataggattagatcatactgatattttaggaagtacgtatttagatatcgcaaaagataaaggtgctatcataaaacctaatgtacccgtcatctatgcagtaaaaaatgaggaagctttaaaatacattagagatttagcggaaaatcagaatgcaaagccaattgaactagatagagaaatcattattgtatctgaagatgatgaatttacttatagatataaagattatgagttagaaacaatcatcttagatatgataggtgatcatcaaaaagaaaatgcttcattagctattacagctttaatagagttgaacgaagaaaatattattgaattagattttaataaaatgattgatgctattgaaagtgtttgttggacaggacgtattgagcaagttaaagaaaaacctcttattattattgacggagcacataataatgaaagtgttgaagcattagtttcaacaatcaaaaattattatgatcttgagaaaatggatgttttattttcagccattaaaggtaaacctgtaaacgaaatgttaagtaaattacaaaatttagctggtacattttattttactgaatttgattttcataaagccttatctaaacaagaattacttgagagtatagatgctgataacatcgaatatattgatgattatgtagattttataaatcattatgatggtgagggcttattgattacaggcagtttatattttataagtgaagtaaaatcgaaagttgaatttaattcataatatatagtatgttaaatatctaaatatagctatgaagaaagttacaaattaaacttcttcatagcttttttattagttatataattgatagattaagagtggactgattatttttaataaaggttttattcattttattgaatttaaaatgctttaaagaagatatatttatttattgaaatgaatttaatctaatcctcgttattccatttacttagaccatattttagttataatgaatgatatgaggtgatcagtataatagtattattagcatttacgtgtagtgtaatatttagttttttatatcaattttcaagtatagagaaagtgaatcttcaatatttcaagcgacgatcacaatgtgattattgtcatacatcattaaagtggtttgatactataccattattaagtttcatattcttaaaaggacgctcgagatgctgttcaaatcctttaaaacgctcctatattataggtgaaatattatcgtttcttattgtcccatatttaatatttatcgatatacatataaattattctctctttatattaacttgtttaatgttgataacgatgtctctaaccgatattcaaacattaacaatcaacagtaacttaattctcgtttttttctttgtcggtatctatatttcttcattacatttgatttcatttatatttattttctttctattacatacattttttctgttaaattctaaaagtatagggtacggtgatattttattacttagtatactttctatattttatacttatgaatttatacttcatctaatattattaacttgtgcaattggtcttatgttttatatcatcttgtttcgttttaagatacgtaaaatcccacttattccttttatttcaatctcatatattttattaattaatttttccaacaatattatgtaactaataaagaaaaggtgatgtttttgaaaattaaagatatggccaaaagtgagcttcctaaagagagactcattcaatatggtgaaaaaagtttgtctaacagtgaattattagcaattttaattaacactggacgacaaggggtttcaagtattgatattgcaaatgaaatgattaataaagtaaataatttaaaagaattaaaattactttcaatacatgatttgttaaaaataaaaggtataggattgcataaagcagtgacactaaaagccgctttcgaattgggagaaagaataaataaacgtaattcaattgaaaaagtaaagattaaatctcctaaagatgtcgcagatatgatgatgtctaaaatgaaagatttaactcaagagcatttagttgctttatttttaaatactaaaaatatagtgataaaagaagaaactatatttataggaacattaaactcttcagtgatacacccaagagaagtctttaatgctgccattagagcttcatgtaatgcagtaattgtgattcataatcatccatctggagatgtgacgccttcaaaagaagatattgctactaccattagacttaaagaatgtggacaaattcttggcattgaattacttgaccacattattatcggtgatcaaaaatttactagtttagtagaggaggggtatttcgtataaaagattaaaaattatttatagtctcattgttaaaattttagtataataagccttaattatatatttagaggtgtatgatgactttaattttaatcataggggtgttaatacctattatttacataatgagattgaatattaaacaaaaaacaattcgtttaaaagaaacgcttaataccgtgttattatcgattgttggtattacaattttttcttttattggagtattcgtcaaccatacgcatactcaattatatattttactcattagtgatatagtaactggaacgatatttgggttactattagcaacaatatataaaatttatgaatacttgtctcaaagcaatcgtaaataaagctagttaacttttcatacaatacaatcataaacgaattaataaagggtagattgtattaattacattgaaaagtaactagctttttcattatcttatataagctgaaagcacattaaaattttctaaaatccaaagaacaccttgataggctaaatacagtccgagaataataaaagcagcagagattaaaaatcttaaaagtgcaaatcctactttaaaaagtataactgcaagcaagataagtaaaataattgtaagaatgttcatttctcacactcctctaaatttattttacgagtgatattaattattataatatattttaagaaaatgttaatcagtcttaagaatttacttaatttacttctttagaccgatggataaaatctattttgtatttataataatttagatttaaaattggagggattttattgcgaatggtttttagtatttttaaaaatatagtagcagttattgcaatccttagtattgtttattttgcattaaaatatgccccgtttttaagagaacaggactggaatcctatgaatcaacctcccaataaccaattcgagctcttgccaagtaatcaaacatcaacaccagtgcctactaatgaaaaaagttatactatagaagaaaatcatttacttcagaatattcctgctagtcaaacaaaaaatgtgtttaaatttatagataaaaaagaatttatggaagtttcaggtatagttagaatgggatataatgataattacattgtagggcaaagagataatgaatttatcatctataaattcggaagtgatacgattaaagtctttagtacggaaattgaaatggaacaggaattaaatcgcctaggacaatcaatcactttaaaacctcagaatgagtattaaaaaatataatttgaaaaaaataaataaatgcgttaatgtctaaaatagatacaataatcttttgaaggttggtgtaatgtatgtctgaacaatctaaagaaaaacaggcaaatgaacaagcaaaagcacaaaatttattttctaaatggagaaaagacgaaacgctctatgaagaagataaaaaagataagccgaataaagaatcgtaaaattaaataagatgacatttgataggagcaagtactagaattcaatgaagattctaacttgttcctttttttctttgaagataatatttaatattattctttatttcaatcctagagtaatataaaatagaatataataatttaaaataaatagtagaggtgttatgagtgttaaatttttttaaaaataacaagttaattgttgttttttgtgcaataattatttttattgcattgattggtttgtccattcgttcacaaactcaatcacctcctgagcaatatgtgggggactcagtgtcatttggtcagagagtaattagttaccctgtcaattttgtgactggagctataggtaacttctttcaatctaacaaatcaaatcataatgaagttaatcaattaaaagcaaaaaacgaagcattagaagcggaaaataaaaacttaaaaaaagaacttgatatgactgatgcttcaaaatacgatgcaatttcaggtgccatcatagcacgtaatccagatcaatggatgaatactgtgattattgataaaggtaaaaaagctggtgtaagcaataatatggcagtgtttactagtgatggtttaattggaagagtaactagagtgaatcaattttcttctcaagttgatttactttcaacgaatacaagagctggaaaactatcagtcaatattcaacatcattctaaaaatgtttttggattaattgatcactatgataataaaactcaggaattaattattagtaatatcaataataaggataaaatttcaaaaggtgacaaagtagtaacaagtggattagccgatcaattgccaagtgatttatacataggagaagtgacgaaggtagaaaatgatgaatatggtttagcaaaagaagtgagggtgaaaactggagcaaatttatcagatattcaacatgtatacatagcgaaaaaaagtaataacacggatttcaatgaaagagagactcgataatgaaagcgttcgtttatataatgatcggtatcatcgttttttatcttgatacacttattggtttggttattccttttcatataggcaacctaacatttatcttagttcctcatttaactctaatgtatttattacttttatcaatttatagaccatttatggtcacattattactaagcatttttttaggtatgataactgatatctactttggcagtgtatatggtttatatttgtttggttatatattcttaataacaatatttaataagttcttgaagattttttaccgagactatattatggtatattggttcagtatcattggtgtaatgattcttgaaatatttgtagcaattatatattctgttattagctatgtagaatttgatttactaaactttatattactacgtattatcccaacacttatattaaatattattttattaattattttgatgcctatattctttaaattctttaaaaagccaatataatagattgacattgaatataagtaatggtaagatgcaatagttgagtagttttatagctacatacaaccgctcaaatacaggtttaagcgttaaaatgttatattttatcacctgtatatggcgtgacttataattataggaggtgcaaggtatgtttgctattatcgaaacaggcggtaaacaaattaaagtagaagaaggtcaagagatcttcgttgaaaaattagatgttaatgaaggtgattcattcacatttgataaagtattatttgtaggtggagattcagttaaagttggtgctccaactgttgaaggagctacagtaactgctactgtgaacaaccaaggtcgcggtaaaaaaattactgttttcacttacaaacgtcgtaaagattcaaaacgtaaaaaaggtcatcgtcagccttatactaaattaacaattgataaaatcaacgcttaattatgattactgttgatatttcaattaatgatgaaggtaaagtaacagacgtcatcatggatggccatgctaatcatggtgattatggctatgatattgtttgtgcaggggcttcagctgttctttttggaagtgtgaatgctattttaagtttaacttctgaaaatccggatattgattatgatgatgacggtggtcattttcacattagatcagtagacactaacaatgagcaagcacaattaattcttcaagcaatgcttgtgtctttacaaacgattgaagatgaatataatgaaaatataagattaaattataagtgaggtgtatcccgatgttaaaattaaacttacaattcttcgcatctaaaaaaggggtaagttctacaaaaaacggtcgtgactcagaatcaaaacgtttaggtgctaaacgtgcagacggtcaattcgtaacaggtggctcaattttatatcgtcaacgcggtactaaaatttatgctggtgaaaatgtaggtcgtggtggcgatgatacattattcgctaaaatcgacggcgttgttcgtttcgaacgtaaaggtcgcgacaaaaaacaagtttctgtatatgcagtagctgaataatttttgtctaattaacaccagaagtgaagacttctggtgttttatttttgtttaaaaatgattataatagaatctaacgttttagagttaatgatataatattagcgatgaattaataaaatatataaaaagaggtgagatatatgtttgtcgatcaagtaaaaatatctctaaaagcaggcgatggaggtaatggtattactgcttatcgtagggaaaaatatgtaccatttggtggccctgctggtggcgatggaggtaaaggtgcttcagtcatttttgaagttgatgaaggtttaagaacacttttagactttagatttcaacgtcattttaaggctaaaaaaggtgaaaatggtcaaagtagtaatatgcatggtaaaaatgcggaagacttagttttaaaagtgcctcctggtaccattattaaaagtgtagaaactgaagaagttttagcagatttagttgaagaaggtcaacgtgcagttattgctcgtggaggtcgtggaggtcgtggaaattcacgttttgcaacccctcgaaatccagctccagactttagtgaaaatggagaacctggagaagaactagatgttaccttagaattaaagctacttgctgatgtgggactcgttggattcccaagtgtagggaaatcaacattgttatctattgtatctaaggcaaaacctaaaattggagcttatcattttacaacaattaaaccaaatttaggtgtggtttcaacacctgatcatagaagttttgtgatggcggatttaccaggtttaattgaaggagcttcagaaggagtcggtttaggtcatcaatttttacgtcatgttgaaagaacaaaagttattgttcatatgatagatatgagtggttctgaaggaagaaatccacttgaagattatcaaatcatcaataatgaactgataaattataaacaaagattagaagatagacctcaaattatagtggcaaataaaatggatataccggaatcaaacgataacctagaattatttaaaaaagaaattgatgaagatgtaactattgttccagtttctacaattacaagagataatattgatcaattactatatacaattgctgataaattagaagaagtaaaagatattgattttagtgtagaagaagacgaagatgcaggtgttaatcgcgtattatataaacatacaccatctcaagataaatttacgattacaagagatgatgatggtgcctatgtagtaagcggtaatgcaatcgaacgcatgtttaaaatgacagactttaatagtgatccagcagtaagacgttttgcacgtcaaatgcgctctatgggtattgatgatgcattaagagaacgtggatgtagtaatggtgatattgttagaatacttgggggagaatttgaattcgtcgaataggagggctttttagtggacagcaaagattataaaaagttttatttaatacgtgaagacgttttaccagaatcagtggttaaaacgcttaaaattaaagacgctttaaaaaatgatgccacactgtccatttatgaagcagttaagcagtttaatctatcaagaagtgctttttataaatatagagatactatttttcctgtagatgaaaagatttttgaacaccgtgaattcaccttaattctctatgttaatgatatagtaggaatgcttgctcaagtattacaaactatttcaaaattagcgttatccgttttaactattcatcaaagtgttccaatggaagaaaaagcaacgattacactctctttgagtgcaaaagatcaatcattatcaatagaaaaggtcatgggcactttgagaaatattcaacatgtttataaagttgaattaattagtatgagtatgtaaggaaggtatctatgtacgcttatataaaaggacatttatctcaattgtttccaacacatattgttgtagaaacgtctaatggtatcggttatgaaattcaaactccaaattcatatcgatttcaaaaatatttaaatcaagaatgtaaagtctttacttcactgattgtaagagaagacgcacaattattatatggttttattagcgaagaagaaaaagagatgttcttaagcttaataaaagttacaggtataggccctaaatcagctttagctattctagcaacaagtacacctaacgaagttaaacgtgcaattgaaaatgaaaatgatacttatctaactaaatttcctggtataggtaaaaagactgcacgacaaattgtattagatttaaaaggtaaagttaagattacagaagagactagtgagaccttattacaggttgagggacaagttgaagaaaatgacaatataattaaggaagcgttattagcgcttgcagctttaggatactctaagagagagctttctaaagttgagaaagtgcttaataaaacatccatccactctgttgatgaagcagttaagattggtttaaaaacgcttatatcttaatattatgaacgataactggggggataaatatggatgatagaatggtagatcaatcattacacaatgaagaatcttcttttgaattctcactcagaccaactaaattaaaacaatatattgggcaatcatcaataaagaataatttagaagtttttataaaagcggctaaactaagggatgagccattagatcatgtattactttttggtcctccaggattaggtaaaacaacactttcaaatattattgctaatgaaatggaagtcaatataagaactgtatctggtccatcattagagcgacccggagatttagcggcaattttatcaggtttacagcctggagatgttttatttattgatgaaatccatcgcttaagtagtgtagtagaagaagttttatactctgctatggaagattttttcttagatattattatcggtaaaggtgatgaagcacgtagtatacgtattgatttaccaccttttactctagtaggcgcgacaacacgtgctggaagtctaacaggccctttaagagatcgatttggtgttcatttaagattagagtactattcggaatcagatttaaaagaaatcattattcgaactgctgaagtattaggtacaaaaattgatgatgaaagtgcagttgagcttgctaagcgttcaagaggaacacctcgtgttgcaaatcgactactaaaaagagtaagagattttcaacaagtaaatgaagatgaacaaatttatatcgaaacaacaaagcaagctctaaacttattacaagtggatgatgaaggcttagattacattgatcataaaatgatgaattgtattattaatcaatataatggaggtcctgtgggactggatacgatagcagtgtcaattggagaagaacgtattacaatcgaagatgtctatgaaccctttttaatacaaaaaggatttatagaacgaacaccaagaggtagaaaagcgacaccatttgcctatgaacatttcaaaaaaattaaagaatgagggaataatatgaacgttgaggagtttgattatcatttacctgaatcattgattgctcagacacctttaaaaaatagagatcaaagtagattacttgtgctaggtagaaagaccggaaatattgcacataaacactttacagatattatggattattttgaacctggagatacattagtattaaatgatacacgtgttatgccagcacgtttattcggtttaaaagaagaaacaggtgcaaaggtagaaatgttaatgcttactagaatagaggacaatgactgggaagtattattaaaaccagcaaaacgtattaaagtaggtaatactttatcatttggtaacggcaaaatcattgctgaatgtataaaagaattagaacaaggtgggcgcattatgcgtttacattatgaaggtattttagaagaacgcttagatgagttaggtgaaatgcctttaccaccttatattaaagaacgtttagatgatccggatagatatcaaactgtgtatgctaaagaaaatggttccgctgcagcgcctactgcagggttacattttacagatgagcttttacagaaaataaaagacaaaggtgtcaatattgcatttattacactacatgttggcctaggtacctttagaccagtaagtgtggaggatattgatgatcatgaaatgcatagtgagtactatcaaatgactaaagaaacggcagatatgctgaataaaactaaagaaaatgggcatagaattatttctgtaggtacgacgtctactagaacgttagaaacaattcgtcgtgatcatgaacaatttgtcgctacaagtggttggacagatatatttatttatccagggtttgaatataaagcaattgatgggttaattactaattttcatttacccaaatcaacattagtgatgttagtctctgcttttagtagtcgtgaatacattttgaatgcttataaagaagcggtaaaacttaaatatagattctttagttttggagatgcaatgttaataatttaatgaatgagaggtacagattatgccagcagtaacttatgagcacattaaaacatgtaagcaatcaggtgcacgtttagggattgttcatacaccccatggctcatttgaaacacccatgtttatgccagtaggtacgaaagcaacagttaaaacaatgagtccagaagagttaagacaaattgaagctagaattatattaggaaatacgtatcatttgtggttacaacctggaaatgatattatcaaacaagctgggggcttacataagttcatgaattgggatggccctattcttacagattctggtggtttccaagtgtttagtttgagtaatcttagaaaaatatcagaagagggtgtcgaatttagacatcatacaaatggctctaagttgtttttaagtccagaaaaatcaatgcaaattcaaaatgacttaggttcagatattatgatggcatttgatgagtgtccgcctatgcctgccgaatataaatacgtaaaagattcaattgaacgtacaacaagatgggctaaacgatgtcttgaagcacatcaacgtccagaggaccaagcattatttggtattatacaaggtggagagtacaaagacttaagagaacaaagtgctaaagaacttgtatcattggattttcctggatatgctattggtggtttatctgtaggtgaaccaaaaccagtgatgtacgatatggttgaacatacggttcaatttatgccagaagacaaaccaagatacttaatgggagtaggatcacctgatgcattaatagaatgtagcattcgcggtatggatatgtttgattgtgtgttgccaacacgcatagctagaaatggaacatgcatgacatctcaaggacgattggttataaaaaatgctaaatatgcagatgattttagtcctatagatgcgaattgtgattgctatacttgtaagaattatacacgtgcatatattagacatctaattaaagcagaggaaacgtttggtatccgtcttactactattcataatttacattttctgctaaaattaatggaagatattagacaggccattcgagaagatcgtttattagattttaaagaagaatttttcgaacaatatgggctaaatgtagagaaccctaaaaacttttaataaggagaacaatataatgaatgtttcagcattaatcttgcctataattttaattatagtattttatttctttttaattagaccgcaacaaaaacgtgcgaaagaacatcgtgaaatgattagtcgtatcgaagcaggtcaaaaaattacaactattggtggaatcaaaggaactgttaaagctgtggatgaaacagcagttgtaatcacagtaaatggtcatggtactgaaatgacatttgaaaaacctgcgattaaacaagttgacccatcataaattataataacaagacattccagacaacaaattgtcgtggaatgtttttttattaactagctatcgtgattacactaataaaaaggttatgttaagatagataagtcttgtcacatagatgtaatctttaattcacttgcacatggtttattaaaagattattctaattacataattaaataatgaggtgttcatgtgaaaaaaacaagtagaataattgcattcatactcattgtagcgctactatttgtaggtatgggctttacatataagaatgtagttaagaatgtaaatctaggtttggatttacaaggtggttttgaagtattatatcaagttaaaccacttggcggtgatggtaaaatcgatgataaggctttacaatctactgctcaaactttagaaaatcgtgttaatgtattaggcgtatctgagcctcatattcaagttgaagaccctgatagaattagggtacagctcgcaggggtaaaaaatcctgatgaagctcggaaaattttgtcttcacaagcaaatctgactatacgtgatgctaatgatcatgttaaattaacaggtaaagatattgtacaaggttctgcaaaacaagaatttaaacaaggtacaaacgaacctgcagtcacttttaaattaaaagaccgcgcgaaatttaaaaaagttacagaagaaatttctaaaaaacaagaaaacatgatggtagtgtggttagattataaaaaaggtgatagctatcataaagagttggataaacctgaagataaacggaaatacgtttcagccgcttcggtggatcaacctattaattcagacagtgtagaaatttcaggtggcttccagggtcaacaaggcgtagaacgtgctaagcaaattgcagaattgttaaatgcaggttcattaccagttgatttaaaagaagtttattctaattctgtaggtgcacaatttggtcaagatgcattagataaaacaatctttgcatcaatgattggtgttgcaattatctatttatttatggtaggtttttacagattaccaggtattgtggcagtgattgctttaacagtatatgtttatttaacattagtagcatttaactttatttcaggtgtacttacattaccaggtttagctgccttagtattaggtgtaggtatggctgtagatgcaaatatcatcatgtatgaacggattaaagatgaacttagagtaggacgaacgcttaaacaggcttattctaaagcaaataaaagttctttcttaacgatttttgattcaaacttaacaactgttatagcagcagcagtgttattcttctttggtcaaagttcagttaaaggatttgctacgatgttattattaggtattttaatgatattcatcacagctgtctttttatcaagaggactattatcacttttagtttcttctaattactttaagaagaaatattggatgtttggtgtaaataaaaataatcgccatgatatcaatgaaggtgtagatgttcatgacttaaaaacagcttttgaaaaatggaattttgttaaattagcaaaaccattaattggagtaagtattttaattttagtaattggtataattattctaagtatatttaaacttaacttaggtattgatttctcatctggtacaagagtagatcttgattctgatacgaagttatctcaaacgaaagttgaacgtacgattaaagatgttggtttgacacctgatcaaattcaaattaatggtaatgacaataaacaagcaacagttcaatttaaaaatgatttatctaaagatgaaactttgaaacttaataaagtcattaatgatcaatatggtcataaaccgacagtgaacacagtctctccaatgattggtcaagagttagctaaaaatgcaatgaaagcattaatttatgcagctattggtattattatctatgtttcattaagattcgaatggagaatggggctttctgctgtcttagcattacttcatgacgtatttattatcattgctttattcagtttattaagacttgaagtagatattacgtttatcgctgcaatcttaacgattgtaggttattcaataaatgatacaattgttactttcgaccgtgtaagagaaaatcttcataaaatcaaagtcataacagaacctcatcaaatcgatgatattgttaaccgatctattagacaaacgatgactcgttctgttaatacagttcttacagtcgttgtagtagttatcgccatactgatctttggtgcatcaagtctgtttaacttctcattagcattacttattggattattatctggtgtattctcttctatctttattgcagttccactatggggcatcatgaagaaacatcagttgaaaaaatctgagaacggtaagcttgtagtttataaagagaaaaaatcaaatgatgaaaaaatcttagtataattaaatacatgatataaaattagtggaagaaacaaaagaattctaattgaattcagtgtttcttcctctttttatttattctttttttaggtataattgcttgtggaaaaaggaaggataactttatgattcaatctaaatataaatggctttatgaagcacctaaacaagatatatcgtctgagattattaaggaatttaatttatctcctattgtaagaaagattttagaaagtaaatcgattacacagtatgatgagataaatacattaattaatggtacaaataaaaagcatgattcatggctaatgagtgatatgcgaaaagctgttgatcgaattaatttagcgattgataaacatgaaagaatattagtatatggagactatgatgctgatggcgtaacatctacaacgatattagttcaaacactgcaaaaattgggcgctgaagtcggttggtatattcctaatcgatttagcgaaggttatggtccaaataaatatgcctttcaaaatgcttacgatgaaggcgtatcacttattattacagttgataatggaatacaaggtcatgaagaaattgaaatggtacaaacattgggagtcgatgtaattgttacagaccatcatgaaataggccgtacattaccaaaagcatatgccattattcatcctatgcatccagaatttgaatatccatttaaatatttatgtggagctggtgtcgcatacaaattatcgcaatgtttaatagatcatcctccagaatatttcatagcgcttgcaactattgggacgattgcagatttagtgtcactgactgatgaaaacagaacgattgttcaagaaggtcttaaatatttaaatcaatcctgtccatttcaaattcaatcattattaaatcaagcaggatttaatgatgaaatagatgaagaaacaattggtttcattattggacctcgtttaaatgcggtaggtagattagaagatgcgtcattagcagcggaattactgatggcagaagattctgaagaggcgaattttttagctgaacaagtagaagcttttaacattgaacgtaaagatattgtcgctcaaataacagaagaagcactattgatggctaatgaaaaagttgaaaatggcgacaaatttttacttttagctaaagaaggatggcatgagggagtattaggtattgtggcttcaaaaattgtagaaacttatgctttacccactcttattttaaatatagatttagaacaacatcatgcaaaaggttcagctagaagtattgaacaagtgtctatgttcgaaattttaagtgcacatcaagacttgatatctaaatttggtggtcatcatatggcagctggaatgacgatggagattaataatattgatgcattatcaaaaggattaaatgaatggatggttcagctttctaaacatacttctttagaaccaacaaaacatattacgactaaactttcagaagatgacattacggtatcaaatattcatgatattaaaatactgaaaccgtttggtactgattttgaaaaacctttatttgaattggatgatacagaagttaatgacgttaaagcgattggaaaagataaaaatcatttaaaattagtaactggtcaagctaagttacaacatttattttggaaaaatggtgatttaatgacacaaatagaattaggccaacccgtcaatatcataggacatttacaaataaatgagtggaatggcaatcagacacctcaaatgatgatacaagatttagcgactcaaaatgagcaaatattagattatagaagtaaacgtaaacaacttaacattgatacgtcatctaaaaatgttgcttttgtcattcattctaaaaaagagaagctaggggagaattatttccattacggtgaaacaattgattcatcatataatacgattgtatttcgtgatttaccaactgatttagatagtgttaaacaatctctaaaacatttagaatactcacaactctatttagtattacaccatcaacattcaatttatttcgaggggttaccgagtagtcatctatttaaacaaagttatagggcactattcattaggaaagaaatgaatttagaaaaagaagggttacaattatgtcaatacttaaatattaagccaaatactttaaagtttattttaaaagtatttcttgacctaagttttatttacgaagaaaatggtataattaaaataaatgataatccaagtaaacaatctattgagtcgagtcaagtttataaatcgagacagtcaagaattgaagttgaaaaattaatgctttatgatgacttttcacatcttaagaattggattaaagctcaaaaagcgtaacgcataggaggaaatttttaaatggatttaaagcaatacgtatctgaagtacaaggctggcctaaaccaggtgttagtttcaaagatattacaactattatggataatggtgaagcatacggttatgcaactgatcaaattgtaaagtatgcaaaagatcgtaacgttgatattgttgtaggccctgaagcaagaggatttattattggctgtccagttgcgtactcaatgggaattggatttgcacctgtaagaaaagaaggaaaattaccacgtgaagttattcgctatgaatacgacttggaatatgggacaaatgttttaacaatgcataaagatgcaattaaaccaggacaacgtgttttaatcactgatgatttattagcgacaggtggaacaatcgaagcggctattaaattagtagaagaattaggtggtattgttgttggaatagcttttattattgaattaaaatatttaaatggtatggaaaaaattaaagactatgatgtcatgagtttaatttcttacgatgaatagtcattaatttagtaactagattaatatatattaaagcgagtgtaggaattcagattgaatactatctcgttttttttattatcgttgcatcatcattaatctaatcacatttatttatttaaaaacttgtagtattatataactattatttaaaccaaagttaatcttttagagattttaatacttttgttaaaattacattaatactcacgcatctttaattaataggagtggtactcggattaattaagtaatgaaaagaaatttcttgattttcaatggttcggttatcggtagagtatttgaaatattaaaaagtcggggtgtcatatattgaataacgagtatccatatagtgctgatgaagtactaaataaagctaaatcctatttatcagcagatgattatcaatatgttttaaaaagttatcatattgcttatgaagcacatcaaggacagtttcgaaaaaatgggctaccttatatcatgcatccaattcaagtagcaggtatattaacagaaatgcgcttagatggaccaacaattgtagctggctttttacatgatgtgatagaggatacaccatatacatttgaagatgtaaagaatatgtttaatgaagaaattgcacgaattgtagatggtgtaactaagttaaaaaaagttaaataccgttctaaagaggaacaacaagctgaaaatcatagaaagttatttattgcgatagctaaggatgttcgtgtcatattagttaaattagctgaccgcttacataatatgagaacgctaaaagcaatggctagagaaaaacaaattcgtatttcaaaagaaacattagaaatctatgcacctttagcacatcgtctaggtattaataccattaaatgggaattggaagatattgcattacgttatattgatagtgtacagtattttagaattgttaatttaatgaagaaaaaacgtagtgaacgtgaagcatatattcaaaatgctatggataaaattcaaactgaaatgaataaaatgaatatccaaggtgaaataagcggtcgccctaaacatatttacagtatttatcgtaagatggtaaaacaaaaaaaacaatttgatcaaatatttgatttattagctatacgagtgattgtgaattcaattaatgattgttatgctattttaggcttggttcatacattatggaaaccgatgccaggtcgttttaaagattatatcgctatgccaaagcaaaatatgtatcaatcattacacactactgttgttggacctaatggtgatcctttagagattcaaattcgaacatttgaaatgcacgaaattgctgagcatggggtggcagcgcattgggcatataaagaaggtaaaacaataaattctaaaacacaagatttccaaaataaacttaactggttaaaagaacttgcagaaactgaccatacatcttcagatgcacaagaatttatggaatcacttaaatatgatttacaaagtgataaagtatatgcgtttacgcctgcaagtgatgtgattgaattaccttatggcgcagtccctattgattttgcttatgccatccatagcgaagtgggtaataaaatgattggcgcaaaagtcaatggtaaaattgtgcctattgattatatgcttaagacaggcgatattattgaaattcgcacaagtaaacattcatacggtccaagtagagattggttgaaaattgttaaatcatctggagcaaaaagtaagataaaaagtttctttaaaaagcaagatcgttcttctaatatagaaaaaggtaaatttatggtagaagcggaaattaaagaacaaggttatcgagttgatgagattctaacagaaaaaaatattgaagtcgttaacgaaaaatatcattttgccaatgatgacgatttatatgctgcagtaggttttggtggtgttactgctttacaagtagtgaataaattaacggaaagacagcgtatacaagataaacaaaaagcattaaatgaagcacaagaagtcattaaaacgtcaccaattaaagaagatatcattactgatagtggggtttatgtcgaaggattagagaatgttttaatcaaattatctaaatgttgtaatccaattcctggtgatgatattgttggatatatcactaaaggacatggtattaaagttcatagatcagattgcccaaatattaaaaatgaaaacgagagattaattaatgtcgaatgggttaaatcaaaagattcaacacaacgttatcaagtagatttagaagtcaatgcatatgatcgaaatgggttactcaatgaagtgattcaagccgtaaattcaaccgtaggaagtattattaaaatgaatgcacgatctgatattgacaaaaatgcaattattacaattagcgttatggttaaaaatgtaaatgatgtatttcgtgtagttgaaaaacttaaacaattgagtgatatttatacagtttctagagtatggaattaaaagaggtgctaagatatgaaaatagttgtacaaagagtaaaacgagcatctgtcactaataaatctattcataaccaaattgaaaaaggttattgtttattagtaggtgttgggaaaaattcgacggaatctgatatagaagtattagcgaagaaaattattaatgcacgtttgtttgaagatgataacggaaaattaaatttaaatattcaacaaattaatggtgcgattttatctatttctcaatttacactttatgcagaagttaaaaaaggtaatagaccaggtttctcacaatccatgcgacctgaagatgccaaaatattatacgataagtttaactctgaacttcaaaagtatgatattgatgttcaaactggtgaatttgggacagatatggaagtagaaattattaatgatggtcccgtaacgattatatatgaaagtcaggatggcaaagtaatatgaataaattagatacatggttaaccaaacatgatctaaaaaatatgttgacgttagtagtagtgttattatttattctttttataatattaatatttatgtttatgaatcataatgatcaagatagtaatagactaacaataacagaagatgctgaaataagaacaggacctaatgcaggatatccggtgatatataaagttgaaaaaggagatagttttaaaaaattaaagacgtcaggaaaatggattgaagttcaaaatgctaaaggagatgaaaaaggatgggttgctggttggcatacgagtttgaatattaaagctgatgtcagtaaacaggaaaatccttttaagaataaaactgtggtgcttgatcctggtcatggagggagtgatcagggagcctcaagttccacggctcttaaatctctcgaaaaaaactatactttgaaaacagcacttgaattaaaacgtgcattagaaaaagcaggagcgcatgttaaattgacgagaacagatgatagttatgtaagcttagataatagaaaagcgacaggtgatgtatttataagtattcataatgattcattagatagtcataatgctaatggcgctactgtatattggtatcaaaatagtcaagaaacattagcagaagtattaaatgcgaatattcaaaaaaagtcattactttctaatcgtggtgtgcgtcaacaaaattatcaagttttaagacaaacgaataaaccagctgtgttacttgaattaggctatataagtaatcctactgatgaaaaaatgattagaaatcaattacatagacaggttgtagaagaagcggttgtagatggattaaaacaatattttgcttcataatacttgcaaacttttcctaaaatcggtatcataatcagtgaactttataaataataccgtttgtattcttgaaaagactaatgaaatagtgaacaatcatattgattgtgaagagaagtaatcctaggctgaaagattatactagtacattggtatctttgaacacaagaaaaggtgctttgataaaataaagccggtttgcgtacgttacacgtgatgagtggagaatatttttattctcaattagggtggcaacacggcatatcgtcccttatatagcatgaagctatataagggacttttttattaaagaaatttaatagttaacaacaatttagaaggagtgattgtatgattaagattcctagaggaacgcaagatattttacctcaagagtctgcaaaatggcgatatattgaaaataaattagatgaattaatgaaattatacaattataaagaaatacgtacaccaatatttgaaagtactgacttatttgcaagaggtgtaggagattctactgatgtcgttcaaaaagagatgtatacgtttaaagacaaaggcgatagaagtatcactttaagacctgaaggaactgcagcagtcgtgcgatcatatattgaaaataaaatgcaaggtgaacctaatcaacctattaagctttactataacggaccaatgtttagatacgaacgaaaacaaaaaggacgttatcgacaatttaatcaatttggtgtagaagcaataggagcagaaaatccaagtattgatgcagaagtattagcaatggtaatgcatatatatgaatcatttggtttaaaacatttaaagctagtgattaatagtataggagatcaagcatctcgtaaagaatataacgaagcattaattaagcattttgaacctgtcattgatacattttgtaatgattgtcaatcacgtttgcatacaaatccaatgagaatcttagattgtaaggttgatagagacaaagaagcagttaaacatgctccaagaattacagattacttaaatgatgaatcaaaggcatattatgaagcggttaaacatcatttagatcaactaggtatcaattatgttgaagatcctaatttagtgcgtggacttgattattatactcatacggcatttgaactcatgatggataatccaaattatgacggtgctattactacactatgtggtggaggtcgttataatggacttcttgagttgttagatggtcctaagcaaacaggaataggttttgcccttagtattgaacgattacttcttgcacttgaagaagaagacatagaattgaatgtggatgaagatttcgatttatttgtcgtaacgatgggtgaaaaagcagaacaatatagcgtgaaacttttaaatgatttaagaaaacatggcgtgaaagctgataaagattacttaaatcgaaaaattaagggacaaatgaagcaagctgatcgtttaaatgctaaatatacgattgtaataggtgaccaagagctagacaataataaaattgatgttaaagaaatgtctacaggtgaaacaaaaacaattcaattagatgaagtagttagtttctttaataaagaaaaggagaataaataatgggtaaaagaacaacatattgtggtttagtaactgaagaattattaggtcagaaagtaacactaaaaggttgggttcataaccgacgcgatttaggtggccttatttttgttgatttacgtgatagagagggaattgtacaaattgtatttaatccagatttttcaaaagaagctctatctattgctgaaactgtaagatcagaatatgtagttgaagttgaaggttcagtaactaaaagagacccagaaacagttaatccaaaaattaaaacaggtcaagtagaagttcaagtatctaatattcgtataattaataaatcagcgacaccaccattttcaattaatgaagaaaatcaaagtgttgatgaaaatattcgtcttaaatatcgctatttagatttaagacgaccagaattagctcaaacatttaaaatgagacatcaaacgactcgatcaattcgtcaatatcttgataataatggtttctttgatattgaaacacccgtattaacaaaatctacaccagaaggtgcgagagactatttagtgccatcgcgtgtacatgaaggcgaattttacgctttaccacaatcaccacagttatttaaacaattattgatgattagtggttttgataaatactatcaaattgtaaaatgtttccgtgatgaggatttacgtgctgatcgtcaacctgaattcacacaagtagatatcgaaatgagttttgttgatcaagaagatattattcaaatgggcgaggaaatgctttctaaagttgtaaaagatgtaaaaggtattgatattcaaacaccattccctcgtatgacatatgatgaagcaatgaaacgatatggttctgataaaccagatacacgttttggtatggaattgcaagatgtgtcccaattaggaaaagaaatggatttcaaagtgtttaaagatactgtagaacacggcggagaagttaaagcaatcgttgctgaaggtgctgcagataactatacacgtaaagatatggatggattaacagaatttgtaaatatctatggtgctaagggtctagcttgggtgaaagttgtagatgaaggcttaagtggtccgatagcaagattctttgaagaagagaatgttaacacattaaaagaattaacaggtgctaaacctggagatttagtaatgtttgttgcagataagccaaatgttgttgcacaaagtttaggtgcacttcgaattaaaattgcaaaagaattaaaattaattgatgaatcaaaattaaacttcttatgggtaacagattggcctttattagaatatgatgaagatgctaaacgttatgttgctgcgcatcatccgtttacatcacctaaagaagaagatattgctaaactagattctgaacctgaaaaagttcaagcaaatgcttatgacgttgtattaaatggatacgaattaggcggtggatcaatcagaatatctgatggagaattacaagaaaaaatgtttgaagttttaggatttactaaagaacaagctagagagcaatttggtttcttattagatgcctttaaatacggcgcaccaccacatggaggcatcgctttaggtctagatagactagttatgttactcacaaatagaactaatttacgtgatactatcgctttccctaaaactgcttctgcaacttgcttattaacggatgcaccaagtgaagtatcagataaacaattagaagaattatcattaagaattcgtcattaatcttcatttttaaaatagaataatttagtgctaaattgggacgggaattgagtttctgttccaatttttatatacactaacttaaaatttaaataacaataattatattatgtaaacttatatatttaaaaatattttaaaaataaacatcctcatacaatatttaaggatttatttaataagctctttatgataaaatatgtctataagatagtcatctgtgttgttcgtatgtttgctttttatttgggcctaacactttttgatcagggagcccaataggttttcttgcagcgcacacgcctcatttggaggacttgcaaaacaagaaacagggcacccacctgtatatagcaggccgaatgatcaagctttttataactacggcaactacggactctatcggtacgtaaggctttagccttacgtatttttttttgcttttttctgttaatatagtattaacatttgctaagtaaaggagttaattatgaaacatcaattttctagaaatgaattagcctatggacaagaaggactagatttactaaaaaacaagacagtagcggtcttaggagtaggtggagttggttcatttgctgctgaagctttagcaagaactaacattggtcacattattcttattgataaagatgacgtagatatcactaatgtaaaccgtcaaattcatgcattaactactaccataggtcaaagtaaagtaacattaatggaagaacgaattaaactcatcaatccagattgtaaagttacatctcttcacatgttttatactgaagagacatatgaagacatttttaataattacgatattgattattttatcgatgcaagtgacacgattatatacaaagttcatttaatgaaagaatgcttagatagaggaatcaagttgatttcaagtatgggcgctgcgaataaaatagatcccacacgtttcaaaattgctgatatttcaaaaacatatatggatccaatggcaaaaattattcgcaacaagttgaaaaaacttggaataaaaaaaggcgttcctgttgttttctcagatgaaagtccaatagttattcgtgaagatgttaagaaaacagttggagatgcaaatgcaataaatcgaaaaggtcaaatgcctccatcatcgaatgcatttgtaccaagcacagtaggtttaatttgtgcaagttatgtcgtaaatgatattttaaaagacattcctgtacgtagaattaaagataaaggtaataactaacaaaaacctatggaagagatgaaagaggtattatcatcttttccataggttttattagtttttatgatttaaattatcatacactattttaaattgttgttcacttttagaagttgtttttggttcataatatattttattttttaaagcgtcaggtaaatattgttgtttaatataaccattctcataatcatggggatatttataaccgatagatcggcctaagtcttttgctccttgatagtgaccatcacgtaggtgattaggtatttgtccaactttgccttttctgatgtcacttaatgcactatcaattgcttttatagctgaattagacttaggagatagtgataattcaattactgcttgacttagaggaattcgtgcttcaggcaatccgagtcgttcagctgattgaatagctgctagtgttctttgaccagcacttggagaagctaagccaatgtcttcataactaataacgagtaaacgtcgtacgattgttggaagatcacctgcttcaattaatcttgctaaataatgtaaagcagcattaacgtcacttccacgaatagacttttgaaatgcactcatgacatcataatgcatgtcgccatctttatcactgataaaagcacctttttgtaaacaatctttagcatcttctaaagtaacatgacgttgattattggatactttagcacttaatactgctaattccaaagcatttaaagcacttcttacatcaccatgactttgagttgagaaatattttagtgcatcttcatcaattttgggttgatacgattttaaaccattttgatcatcatttaatgctctagttaatgcttgatatacatccttttcatcaagtggatataattcaaaaatttgtacacgtgagcgaatcgctggattaattgcatgataagggttagaagttgtagcaccaattaaaatgattttaccattttctaaatgtggtaataaaaaatcctgttttgctttatctaagcggtgaatctcatctaataataaaatgacttgtcctgacattttagcttcttcaactatcatttgcatatctttttttgtattagttactgcatttaattgtctaaatttatattcagtactgccagctatggctttagcaatactggttttgccaattccaggaggtccataaaaaatcatagaagataattttttagtttctaccatacgtcttataatgcctctaggaccaactagatgttgttgtgaaataatttcatttatatttgtaggcctcattcttgaagctaaaggttctgtattcaattttttcacacctttctattactatattaactgaaaaaatgatagaatgggactatattattcgaattaagtgaggtaaaactatgaaaatatcaacgaaagggagatatgggttaactttaatgatttccctagcaaaaagagaggggcaagggtgtgtatcattaaaaacaattgctgaagaaaatcatttaagtgatttatatttagaacaactcgtgggtcctttaagaaatgctggattaattcgaagtattcgtggcgctaagggtggatatcaattaagagtcccatctgaagaaatttcagctggcgatattattcgcttattagaaggacctattactattgtagaaagtatagattctgaaccaccagcacaaaaagaattatggttgcgaatgagagatgctgttagagaagttttagataatacaacattaaaatatttagctgattttgtagaatcagataacgatttagatggttatatgttttacatttaaaaatttaaatttattatgtttaaaacttttttgctgtggtattggattaatataagtaaaaattatttattaaaaattaaatgcttaaattcgaaaggagaatttcaacatgggattcatggataaagcaaaagatgcagcagagaaatttaaaaatagcgataacgaacaagtaaataaagtaaaagataaaattaatgaatatactggcggaaataatgacagtaaagacgacaaaaaagacaataaataattaaaattgtgagtggtgattttgatcatcactctttttttatgaaaaatttaaaacctgttgacaatttatttatattcaacaggttttaatcaatattatttatttaatttttgaatgactcgtttaaaacgctcatatgattcaaattgtctatcttggtcataaatatagcttacgaccattatttcatcaatatcaccatattcctctaaaaatgcttctaatttagctttcactgtttcttcagaaccaataagagaatcatcaaatctttgttttgccatttcatactctctaggtgttaaaagaccttttaaatcatcagttggtggttgaactggttgcattcttcctcgagcaatactaatgaatacttgtgctaaagaactagctaaatattctgcttctttatcagtttctgtcactatagcatttaaacatacaatcatatatggtttatctaatgcttcagatggttcaaataagtcgtgataaatttcaattgcttctttcatttgctgtggtgcaaaatgacctgcaaaaacatagggtagaccttttctagctgctaaatgtgcagagtcagttgatgatccgagtatatacaacggtacatttttatctactgcaggataagcccttacataagcttgtttatttcctggaccaaaataagtttgtaattgttctacttcttcagggaaagcatacacaccattatgttgatctcgtctcaatgcacttgctgtcatcatatcagtaccaggtgctctacctaatcctaaatctacacgattgggataaatggtttctaaggtaccaaattgctcagcaacaactaaaggtgcatggtttggaagcatgatgccacctgaaccaactttaatattatgagtatgttcaagcgtatgttgtattaacaatgatgtagctgagcttactaaattaggtgcattatgatgttctgcaatccaataacgctcataatctaattcatctaatttctgagctaaagccaccatatcattaattgcatctttatcagtttgaccttctcgtataggaactaaatttaatgcagaaaattttatatcagacatagactatttctcctttttatctttattatctaatagtttaacaacttaaaacgattacagttattaaattgctcatacttaaaataattattgaaagaaaaatagttaatatattaattcataaacaagaaggtagaaaattttagaatgaggtgctattataggaacattgataatattgtgaggagtgtacttaataatggaagtatatgcagattatgctgcaactacaccagtcaaaccagaagttatagaagcaatgatggatatatatcaatcgcactacggcaatccatcttctattcacacagtaggtagagatgctagacgttatttagatgaatctagaagaaatgtagctcaattactaggtgctaaaccaagcgaagtcatttttactagtggtgctacagaatcaaataatactgctattaaaggtttagtctatgctaatgagcatttaggtaatcatattattactacaaaaattgaacatcattctgtattacacgtattcgagcaactagaaaaagaaggatatgaagtcacatatttagatgtagatgatacaggtaaagttgatttggatcaattggaagaagccttaacagatgatactatcttagtatctattatgtttgtcaataatgaagtgggcacagtagaacctatttacgatatcgaaaacattgtttctaattcaaatgctctattacatgtggatgcagtccaagcaattagtcatttagatattaaatttagtgagtttaatattgataccatgagtattactgctcataaatttggtggacctaaaggtgtaggtattttattagtaaaaaacaatacaccaatcgagtattctcaattaggcggggaacaagaaactaaacgccgtgctggaacggaaagtgttccacaaatagttggaatgacaaaagctctagaaatagctactaaaaatcgagatcaaaataatattcatttaatgcaattaaaagaactatttttagtaagtttgcaagaacgtgcaattccatttgaagtcaatggttcaatggtagaaacgactggccatatacttaatttatattttccatttatagatgtagaaacaatgttaactttattggatttagcaaatatttatgtttcgtctggttctgcatgtacagctggttcaacaactccgtcacatgtacttgctgctatgtatgaagatgaagatcgtgcaaaacattcagttagatttagttttaatgaactcacaaccgaacaagatataaaatatattgttgctgaaattcataaaatatatcataaatttaaggaggaatagaacttgtcaaataaagatatacgtgttgtagttggtatgtctggaggtgtagatagttcagtcacagcatatcttttaaaggaacaaggatatgatgtcattggtatcttcatgaaaaactgggacgacacagatgaaaatggtgtatgtacagctacagaagattataatgatgtcatagctgtatgtaatcaaattggtataccatattatgctgtgaattttgaaaaagaatattgggataaagtattcacatatttcttagatgaatataaaaaaggtcgtacccctaacccagacgtcatgtgtaataaagaaattaaatttaaagcatttttagaacatgcattaaaattaggagccgattatgtggctactggtcattatgcacgaatccatcgacatgaagatggtcgcgtagaaatgttacgtggggtagatgataataaggatcaaacatactttttaaatcaattatctcaagaacaattatctaaagtcatgtttccaattggagacatagaaaaaaaagaagttcgtaaaatcgctgaagaacaagacttagcaacagctaagaaaaaagattctacaggtatttgctttattggggaacgtaattttaaatcattcctttctcaatatttaccggcacaatctggtgaaatgagaacactcaatggtaaaaaaatgggcatacacagtggtttaatgtattatactattggccaacgtcatggactaggtattggtggagatggagatccatggtttgttgttggtaaaaatcttgaagataatattttatatgtcgagcaaggcttccatcatgatgcattatatagtgattatttaattgcttccgacgcatcatttgttaatccagttgatttagaaaatggatttgaatgtactgctaaatttagatatcgtcaaaaagacactaaagtatttgttcaaaaagaagatgaacaatctattcgagttactttcgacgaacctgttcgagctattacaccaggccaagcagtggtattctataatggagaagtttgtttaggtggcgctactatagacgatgtatataaaacaacaggtcaacttagctatgttgtttaatttttagtaaaccgttaactcattgtaaatgagaattagcggtttctttttaattgcaaatttatgttagaaatggagacatggaaatgattgaacaagaaacaatatatcagtggatgaataatggtaattatgaagaagccattaaagcattatttaataacattgaagagaatcctaacattattgaaaattatattaatgctggtattattttagctgatgttggtgagattgagaaagcagaaagattcttccaaaaagcaataacattagatgacaaaaatggtgctgtttactataatttagctaatctatattatgaacaatctcgttttcaagaagcaataaaactttatcaacgagctttaaagtataatatgaatcccattgatactaattatatgattggtatgtcttttagccaactagatgcgcaaagagaagcattacccttttttatgactgctgctgaattagatcaaactttggacacagaagttcaatttcaatatggtttaaccttatgtcatttagaaatgtttcaagaagccattaagcaattaaactatgttttatctattaatcctaatcacgtagatgcattatataatttaggtctggcaacgtatatggaaactgaggatgctgatgaagcaattcagtattttgataaagcaattcaaattgatcctaaacatttattaagtcagcatgctaaacaaacatttaaatctctaaaaaatgaggaggaataatatgtcaaaccctacactatttgattactcaatggttaaaggaacagttgataccattctatttcaaaataaagataacttttatactgttttaaaagtagattccattgaaactaatgaatcatttgataatctgcctacagttgtagggttttttcctaatattgttgaaggagatgtctatacgtttaaaggacaaattgttcaacatcctcgttatggtaaacaacttaaagctgaaacatttgaaaaagaactgcctcaaactaaagatgccataataagttatttatctagtgatttatttaaaggtattggtaaaaagactgctcagaatattgtaaatacattaggagaaaatgcaataaatgatattttaactgatccttctgttctcgaaaacgttcctagtttagcaaaatcgaaacaaaaacagattgcagaacaaattagtgcaaatcaagagtcagaaaaaataatgattcgcttacatgacttaggttttggtccaaaattatccatggcgatttatcaattttatcaatcagagactttaaaaattctagaaaacaatccataccaattagtttatgatgtaaaaggtattggttttcaaaaagctgatacattagctagaaataatggtattgcttataacgattcagaacgtttaaaagctgggttattatatactcttgaagaagaatgtataaaacagggacatacttatttagatgaaaatgctgtattagaaattacagaagatatgctttcagataagcatttagatgaaacaattgaacaagaacaattaaaacatgtgctacaaacactttttgaagaaaagaaaattattttagagaatagtcatgttgcgattccaagtttatactattcagaacttaaaagtgttcaaaatttgtatcgtatcaacacatacaaaaatcactttaaaataatagagcaatcagatttacagatacatattggtgaaatagaagatcaaaataatgttaattatgctaaatcacaacaagaagcacttgaaacggcgatgaattcgaaaataatgttactaactggaggtccaggaacaggtaaaacaactgttattaaagggattgtagaattgtatgctgaaattcatggtctatctcttaagtattccgattatcaagaagatgattatccaatcgtattagccgccccaactggaagggcatcaaaacgtttacaagaatcaactggattagaagcaatgacgattcatcgattaataggatggaatcaagatactcaaccagaagatattcttgaaaatgaaattaaagctaagctcattataattgatgaaatgtcaatggttgattcttggttgttccatcaatttttaagtgccgttccactagatgcacaaattattctagtaggcgatgaagatcaattgccgtctgtcggtcctggccaagtatttaaggatttaattgagtctaaagcatttccaagagttaatttaactgaagtttatcgccaacaagatggttctagtattattgacttagctcatcgcatgaaacatcatgagtcaatagatattacaaaacgttatcacgatagaagttttattcattgcaatgtagaacaaattccaaccgtagtggagaaagtagtatctagcgctgtaaataaaggatatgatatgagtgatattcaagttttagcacctatgtacaaaggaagtgcagggataaaaagacttaatcaagtattacaaaatattttaaatcctaaagaaaaagatacaagagaaatagagtttggcgatataaagtttagaaaaggagacaaagttttacaactagttaatcgaccaaatgacaatatttttaatggtgatattggcgtcatagtaggtatattttgggctaaagaaaatgcacttaataaagatgtactgattgtcgattttgaaggaaatgaaattacatttactagacaagatttattagaactcacacatgcttattgtacctcaatccataaatcacaaggatcagaattcccaattgttattatgcctattgtcaaacaatattttagaatgttgcaaagacctattttatatacaggtctgacacgtgcaaaacaatctttagtactattaggagatccaaaagcatttgacattgccttaaatactcaaggtcaagaaagacatacacaattaaaaacactaattataaattattttggtatgagtcaggttaatatagacgtagaagagaatgatgaaccgataaatatagatgatacagaggataataatgcagatgaacacattactttaagtgaagaaacaatttatcaaattaatccaatgattaatatgggaaatgtttcaccttacgactttgttgaacattgacaatttaaataaaaatacttaaaataaatttgaattcgcataaagatgagtaaactttttaacttaagtagagatgtactggttggtgaaaagtacaagttaatctgttgaacgctactttgtgttaacgttaatatgataattaagtgatgagaaattaaatatatttgaaaaatatttatttcttgtaactagggtggtaccgcgaaaacgttcgtccctttgttggatgaacgtttttttatttataaatgtattaattatattaggagtgaaaaaatgaaaaaacttaaagcaagtgatatacgtcaaaaatatattgatttctttgttgaaaaaggtcatatggtagaaccatctgcaccacttgtgcctattgacgatgattcgttactttggataaactctggtgttgcaactttaaaaaaatactttgatggacgagaaacacctaaaaagcctagaatagtgaactctcaaaaagcaatcagaacaaatgatattgaaaacgtaggttttactgcgcgtcatcatactttctttgaaatgcttggaaacttctcaattggtgactattttaaaaaagaagcaattgaatttgcttgggaatttttaactagtgacaaatggatggggatggaaccagagaagctatatgtaacgattcatccagaagatgttgaagcctatcgtttatggcatgaagatattggtttagaagaaagtcgtattattagaattgaagggaatttctgggatattggagaaggaccatcaggacctaataccgaaattttctatgatcgtggtgaagcatatggtcaaaatgatccagcagaagaaatgtatcctggcggtgaaaatgagagatatttagaagtatggaacttagtatttagtgaatataaccataataaggatcatacttatacaccacttccaaataaaaatattgataccggcatgggattagaacgtatgacgtctatttcccaaaatgttcgtaccaattatgaaacagatttatttatgccaattattgaagaagtagagcatatatcaggaaaaaaatatcttgaaaataacgaacaagatgtagcatttaaagtcatcgccgatcatatcagaacaatctcattcgcaatctctgatggtgctttacctgcaaatgaagggcgcggttatgttttacgtcgtctcttacgtcgtgctgtacgttttagtcaaacgcttggcattaatgagccatttatgtataaattggttgatatcgttgctgacattatggagccatattatccaaatgtaaaagaaaaatcggattttattaaacgtgttattaaatctgaagaagaacgtttccatgaaacacttcaagagggtgtatctatattaaatcaactcattacgcaagcaaaagaatctacacatcagattaatggttcagatgcgtttaaattatatgatacgtatggattcccaattgagttaactgaagaactagcaagtcaagaaggtattacagtcgacatggcaacatttgaaactgaaatggaacaacaacgtactagagcgagagaagctagacaaagttcacaatctatgcaagttcaaagtgatgttttaaaaaatattaatactgaaagtcaatttgttggatatgaaacaacagaatatcaaacaattttaacagatttaatttataatggtaaaactgttacatctgctgaggctggagaaacagtttactttatcttaaaagaaacaccattttatgcagtaagtggtggacaagttgcagataaaggaacagtaggaaatgatcatttcgaaatagccgttcaagaagttacaaaggcaccaaatggacaaaatttacatcaaggtacagttcaatttggacaagtaagtgtaaatagtcatgtagatgcaactgtaaataaagaagaacgtaaagatatacaaaaaaatcatagtgccactcacttactacatgctgcattaaaagagattttaggtgaacatgttaaccaagcaggttcactcgttgaaagtgaacgattaagatttgacttttctcactttggtccaatgacagaagaagagattgatcaagttgaaagaagagtaaatgaagaaatttggaaaggaatttcagttcatattcaagaaatgcctattcaagaagctaaagaaatgggtgctatggctctatttggtgaaaaatatggtgatattgtaagagtagtcaatatggctccattttcaattgaattatgtggtggtattcatgtagataatactgctgaaatagggttgtttaaaattgtaagcgaatcaggtacaggcgcaggtgttagacgtattgaggcacttaccggtaaagctgcattcttatattttgaagatattcagaataaatttaattctgtcaaagaacaacttaaagtaaaatcagataaacaagtttatgataaagttgttcaaattcaagaaaatgaaaaacaattgaataagcaattagagcaacgtaataaggaaattacttcacttaaaatgggtaatatagaggatcaagtagaaatgattaatggatttaaagtattagctacagaggtagaagtatctaatccaaaagaaatccgtcaaacaatggatgattttaaatcaaaacaacaagatacaattattattttagcaagtcatgttggtgaaaaagtttcgttaattgccgctgtacctaaagagcttacaagtcaggttaaagccggagatatcattaaaaacatggctccaattgtaggaggaaaaggtggcggtcgtccagatatggcacaaggtggcggcacacaacctgaaaacatctcagaatcattacgctttattaaagattatattaaaaacctataactttttaatcaactggtgtaaaattaatatgtaagttaatacatgtcagaggagtgtcgcatctatggaaaatattgataaaactatgaaattcgattatgatgaaattccaaaagaaaatgtccaaacagttttaaaaaacgtacatcaaactctagaagaacgaggctacaatgctgtaaatcaaattgttggttatttactttcaggagaccctgcatacattccacgtcaaaatgatgcacgtaatcaaatacgacatattgatagagatgtaattatggaagaactcgtttcaaactacttaaaagagaataataaataaatgttaagtcataaaattttaggattagatgtaggtagtagaactgtaggtatcgcaattagtgatttgatgggctggactgctcaaggactagacactctaagaataaatgaagaaaatgaagaatttggtattgatagactggtttcaatcataaaagacaataatgttggttcagtagtcataggattaccgaaaaacatgaataattctattggttttcgtggagaagcatctcttaaatacaaagaattgcttcaagaggctttaccaaatattgaaattattatgtgggatgaacgtttaagtaccatggctgctgagcgctcattattagaagctgatgtctcaagacaaaaaagaaaaaaagtaattgataaaatggcagcagttttcatactgcaaggctatttagattcaattcaataaaggagaatatcattatgactgaacataatcacaatcataatacagaattaaatattagtaatgaagaagaattattaactttattcgatgaaaatggaaatgaagttttatatcgaaaaatgctagaattttatcatccagaatttaaaaaagagtatgttattttagctgaagaaggtgctcaatctgatgatgatgacatgattgagctcattccaatgattaatgaaccagatgaatctggtgatggtggtaaacttgttcctatcgaaacagatgaagaatgggatatgattgaagaagttgtaaatacaaatatggaagaataaacagtcttttgttaataataaatctctaatcaatgtactttggttagagatttttaatatttcagacttaaatttaatttagaattatgataaaatatttaaagttaaattactataagcataaatttttaaatatacagtcagttactatatttatacattaaaatataaagtaggtttattattttattttaaataatgtaatattagttgactgatttatttttatgcctattgatattaaaagggaagttatagaagtggaatcaaatcaatcctatttattaaatcttcatgaacagttagataataatattgaagagctaagattttatgcagaagaacatgctgttcctatagtagataaattaactttagacatgataaaacaattaattagaattcatcattcgaaaaatattttggaaattggaactgctattggatatagttcgatgcaatttgcttctgtttcaccagatatttctattactactattgaacgtaatgagaatatgataaaacaagcaaaacttaattttaaaaaatttgaatacgaaaatcaaattcgccttatagagggcgatgcgctatcacagtacgataaagtgagcaatcatttatatgatatgatatttatcgatgcagctaaagcgcaatctcaaaaattttttgaatactatacaccgttattaaaaaaaggtggcttagttattactgataacgttttgtatcatggatttgtatctgatatagatattgtacgatcaagaaacgttaagcaaatggtaaaaaaggtacaaaaatataatacttggcttatgaaacaaaagaactataaaacaaattttttaaatatggatgatggtttagccatatctattaaaggagaatgaatatgactgaattacttgtcactccaaaatctttaaatcatatgaaaacattgatagaactcggtgctgatgcatttgtgattggagaacaaaaatttggattgcgattacctggagaatttaatcgtgaagatgttagaaaagcagttaatttagcacacgaacatgataaaaaagtatatgtggcagttaatggtatttttcataattatcatttaaatgccttagaaaactatattgaatttttacatgaaataagagtggatagaataatttttggtgatcctgctgtcgtgatgtatgttaaaaaacaagataatccgataccattaaattgggatgcagaaacaattgttacgaattatttccaatgtaattattggggtggaaaaggcgctaaaagagctgtattagcacgtgaattaaatctagatgaaattttaaatatcaaaaaacatgcaaatgttgaaattgaagttcaggttcacggtatgacttgtatgttccaatctaaacgtatgttattgggtaattattacacttttcaagatagacaaatgaaaatccaacgtagtgaaaatgatcaagatttattattgtacgatgaagaaagagaaaataaatatcctgtttttgaagattacaatggtactcatattatgtctcctaatgatatctgtttaattgaagaattagagccattctttgaagcaaatatcgattcatttaaaattgatggtatcttacaaagtgaagcatacattaatactgttacagcacaatatagagaagccattgacttatatcatgaagatccagaagcttatgaagatgaaaaatttatgttaattgatccaatagaagaaattcaacctgaacatcgtccgtttgatgaagggttcttatataaacaaacagtatattaagggaggcgccagtatgaagacgttaaatgaaattgaagtaaatgctaaaagaaaaataaaaaaacctgaattattagcgcctgctggaaacttagagaagttaaagattgcggttcactatggtgctgatgcagtatttttaggtggacaagaatacgggttacgttctaacgctgataactttacaatggaagaaattaaagaaggcgttgaatttgcaaaccgttatggtgcaaaaatttatgttacgactaatattatcgctcatgatgaaaatatagacggtttagaagattatttacgtcaattagaagctacaggtgcaacaggaattattgtagctgatccacttattattgaaacatgtaagaaagtagctcctaaattagaaattcatctttcaacacaacaatctctttctaattacaaagctgtggaatactggaaagaagaaggacttgatcgagtagtattagctcgtgaaacaggcgctatggaaatgaaagagatgaaagacaatgttgatatcgaaatagaagcctttattcacggtgcaatgtgcattgcttattcaggtagatgtactttaagtaatcacatgacagcacgagactctaacagaggtggttgttgccaaagttgtcgttgggattatgatttactagctgttgatgaagagggagaattagatttattttatcaagatggcgacgttgtgccttttgctatgagtccaaaagatttaaaattaattgagtctattcctcaaatgatggatattggtatagattctttaaaaattgaagggcgaatgaaatctattcattatattgctacggtagtatcagtttatcgtaaggttattgatgcatatgcagaagatccagataattttaaaattaaaccagagtggttaattgaattagacaaatgtgctaatcgagatacagcacctgctttctttgaaggaacgcctggatatgaagagcaaatgtttggtgttcaacaaaataaaaagtcaccatatgatttttgtggattagttttagattatgacgaagcaactcatattgctacaatacaacaaagaaatcactttaaaccaggccaagaaattgaattttttggacctgaaattgaatcatttaaacaggttattgatgtcatttatgatgaagaaggaaaccaccttgatgcagcacgtcatcctcttcaaattgttcaaattaaagtggatcatcctatttatcctaataatatgatgagaaaggaaattggctaatgacacagacaacaatcatcggaatcgctggcggttcaggatcaggaaagacaactgttacaaatgaaataatgaaaaatttagaaggccatagtgttgctttacttgctcaagattattattataaagatcaatcgcacttaacatttgaagaacgtcttgaaactaactatgatcatccttttgcatttgataatgatttactgattagtaatttaaaggatttacgtaacggtcaagcggtggaagttccaacatatgattataaaaatcatactagaagtgatgaaacaattgcatttgaacctaaagatgttattatcgtagagggtatatttgctttggaaaataaaacattacgtgatatgatggatgttaaaatatacgttgatactgatgctgatttacgtattttaagaagacttgtacgtgatacaaaagagcgagggcgctcaatggaatcagttattaaccaatatttaaatgttgtcagacctatgcataatcaatttatagaaccaacaaaaaaatatgctgatattattattccagaaggtggaagtaataaggtagcaattgatataatgacaacaaaaatacaaacgcttgttggtaagcattaacgaataatatgtattttttcagaattaaattaacttgttgaaaaggaagatgaacttatggaaaatcaaaaacaatatccaatgacacaggaaggttatgaaaaattagaacaagaattagaagaacttaaaacagttaaacgtcctgaagtagtagaaaaaatcaaagttgctagatcttttggtgacttatctgagaactcagaatacgatgctgctaaagatgaacaaggttttattgagcaagatattcaacgtattgaacacatgcttagatatgctttgattattgaagacaacggtgataacaatgttattcaaattggtaaaactgttacgtttgtcgaattacctggcgatgaagaagaaagctatcaaattgttggatctgcagaagcagatgcgtttaaaggaaaaatttcgaatgaatctccaatggcgaaagcacttattggtaaaagtttaaatgatgaagttcgtgttccacttccaaatggtggagaaatgaaagttaaaatcgttgatattaagtaacaaaaaatccaaaaatcattttgatttttggatttttttatagttaaatatttataattatttaactattaattagatataagcaagtacattcatttaatttttagaacttttacatgacaaaaatataaatatatgcttaaataacaatgtagataaattatatagttatcttgtactgaaagggagtaagcgattacattaatgcattacttaccttcttttattattgtctatttgaaagacatattaaactactatgaatacgtggatattttatattactaatatataaaatgaaatacgttatttataatcgaaggaggaccatcatctttggaaataaagattattaatgaacaatcaattgcgctttattttaaagaagaaatatctgaaagtaattacagagatgttgaatccgttactaaacatatacacgctaaaagaatagatggtatcaaagatgtgataccgtcatatagagcaattatgataaattttgataatataaagcttaattttaagcaattaatagatatattagatttaaaacagttaaatggtgaacatgctaaagatatttcagataaaacgatcatacatattccagtattatataattcagaagtcggacctgatttaccatatgtagctaaacataacaaactaactactgatgaagtcattcaaatccatactcaaaatgaatatctcgtttacatgttaggttttatgcctggttttccatttttaggtggattggattctcgtttacatactccacgtcgagatgaacctagagtcaaaattgacgcaggttcagtaggaatagcaaataatcaaacgggtttatatccttctgattcaccaggtggttggcaaattattggaagaacaccattaaaagtatttgatatcaacgacgatgaaatgtctttatatcaagcgggggattatattaagttttattctattgatgaaaatacatttaacgacatccaaagtgaaatagcagaaaatcgatttaataaagaaaagtgggtgttaaatcatgtcgattagtattattcaacctggtatgtttacaactgttcaagatgaaggaagatttggttttcaacacctaggtttttcaagtgctggtgctatggatttatatagttatttaattggtaagactttaattggtaataatggaccgagccttgaatatactattatcggtccaacacttcaatttaataaagataatacatttattttgacaggagcacatgtaaacgcaaaattaaatgaagagacagttgatattaatactgtaatttatgcatgcaaaggcgatattttgaaagttggagcagtgactgcaggcgctcgtggttatattttctttggacatcctttagatattcaaccaatagcagaaagttattcgacacatactagaagtaaaattggtggttacaaagggagaccattatcaaaaggagatttgatatacttaaaagaaaatccatctttcaaacaaaatttgggtaaaacaacagtttataatgctattcccgaagataatataatacatattattaccggtccacaaattgaagcattttcaaaggaaagtataaataatctcgttaatatggaatataaagtttctgaaaaatctgatagaatggggtatcgtcttaatggtgagcatatccctcctaaaactggggcagatattatttcagaacctgttgctttaggaagtattcaagtcccaaatgatggtaatcctattatcttattaaatgataaacaaactataggtggctatacgaaaatcgctacagtcactcaactggatttaaataaaattgctcaatttaagccaggggatttaattcgatttaagtggtcaacgattgaagaagctacaaaggttcaggaacaatatctaaatcactttaatcatttaaatgctgaaattaacacgtcaccaacctttaatatgggtgaaatgagaccgacagcaaagaaattgactaaaatcattacagaggagagatagttatggatataaaaaaaatagaagaagtcattaaacttgtaaaatcaaatgatgtaaaaaaatttaaatataaagataataaaaacgaaatcgaattagattttactgaacaaagtaacaatcaaaataatagtactccagtaatacaatctgaagggaattctcaagacaaaagtatttcagaaaataaccctttaaatgattcagcaaaaacaattacttctcctatggtaggaacattcttcttacaagatagtaaggaattaacggatcctataattcaagtaggtgacaacattaaatctggtgatgttatcggatatgttgaagcaatgaaagtaatgaatgaagtgactagtgatatagatggtgagattaccgacattgtggttgaacatggtacaaacgttgaatacgatcaagttctagttaaagtaaaataaaggggggcagaaatatgtatcgttgtttagtagcaaatagaggagaaattgcggtacgtatcattcgagcgtgtcgagaaatgggaatagaaactgtcgcagtatacgctaaaggtgatgaaaaaagtcttcatgtaagtttagctgatcaagcagtttgcattggagaagcaaatcctttagatagttatttaaatatagagcgtattattggtgcagctgaaatcacaggttctaatgctattcatcctggatacggctttctatcggagagtacaacatttgcccaaaaagttgaagaaaatgatattcattttattggccctaacaaaaaaacaatggaaatgatgggtgataaaataactgctcgtcaaactgttcattcagcaggagtgccagttattcctggctcaacagatgcagtaaattctgtagaagaaattaaagaattagcaaaagacataggatatcctttagtattaaaagccgcaagcggtggtggcggtaaaggtattcgaattgttaaagaagaaaatcaacttgaaaaatcattaaaagaagctaaaagtgaaggtcaaaaatattttaatgatgatcgtgtgtatgtggaagcatttattcctgttgcaaaacacgtagaggttcaagtgattggtgacggaaaagaaaattatgttcatttaggtgaacgagattgttcagtccaaagaaaaaatcaaaaattaatagaagaagcaccatgtgcagcattatctgaagaacgacgtgaaaaaatatgtaatgatgctgtcaaagttgcaaaagcctctaattatcgtagtgctggtactattgaatttttagttactgaagatgcacattactttattgaaatgaacgcaagaatacaagtagaacatactgttactgaaatgcgtgcagatagagatttattacaagcacaattatatttgttattacataataaattaccgtttagtcaagaagatattgtattcaatggtcatgtaatagaggcacgtatcaacgctgaaaatccagaaaagaaattccaacctactccaggtaaagttaaacgtctacacttacctcaaggttttaatattagagtagattcgttattatatgctggttatcaagtatctccttactatgattcactagttgcaaaagttatcgtaaaagactctaatagaacttctgcgattaacaaattaaaagtggcacttgatgaaatggtaattgatggtttcactactacggctgattttctatatgcagtattaagttacccaccatatgcaaaaggaaatgcagaagaagttgatattaaattccttgaaaaacatcaaatagttaaaggagtgaaattatgatgaaagttgatttaaactgtgatctaggtgaagcatttggtaactattcatttggaggtgataaagatatcattcctttaattacatctgctaatatagcctgtggttttcatgcgggtgatgaaaatgtaatgaatcaaacagtaaaattagctaaagaaaatcatgtgagtattggcgctcatcccggacttccagatttaaaagggtttggtcgtcgaaagatggatattagtcctaccgaagtatataacctaatagtttatcagttaggtgctttagaaggattttgtaaagtacaccaaacacgaataaatcatgttaaaccacacggtgcactgtataatatgggtgctaaaaataaagcaattgcaaaagcaattgcaaaagcagtatacgattttgattctactatagtgcttgtaggtttatctaattcattattaatatctgaagctaaagcaatcggattgaaaacagcttctgaagtatttgctgatagacgttacgaagataatggtcaattagttagtcgtaaagaaccagacgcagtcattactgattctgacgaagcattaaaacaagttttgaaaatggtaactgaaaacaaagtgataagtcgcaatggaaaagaaattgatttggaaacagatacaatatgtgttcacggtgatggtaaacatgcactagaatttgttgaacaaataagaaaaaaattaacgaaagaaggcattgatattcaatccttataagggggttttctaatgaaagaaaatttaaatcaaaaacaagataaagacaattttaaatttacaaaaagtcatagacgcttactttatggatctgtatttttaatggctacatcagcgatcggtcctgcatttctaactcaaactgctgtgtttacggcagaattttatgcaagtttcgcttttgcaatcttaatatctatattaattgatattggagctcaaattaatatttggcgcgtattagttgtaacaggtttacgtggtcaagaagtatcaaataaagtgttacctggattaggaactttaatttcaatattgattgcttttggaggacttgcttttaatatcgggaacatagctggtgcaggtttaggattgaatgcaatgtttggacttgatgttaaatggggagcagctattacagccatttttgcaattttaatatttgtaagtaaaagtggtcaaaaaattatggatattgtttcaatgattttaggagtaataatgatattagtagtagcttatgtcatggttgtatctaaccctccctatggtgatgcacttgttcatacagttgcaccagaacatcctattaaattaattttaccaatcattactttagttggaggaacagtaggtggatacatcacatttgctggtgcacatagaatacttgattctggaatgaaaggtaaagagtttttaccatttgtgaatcgttcagctattgcaggtatcttaactacaggtattatgagaacattattattcttagcagtacttggagttgtagtgacaggtgtcactttaaatgcagataatccgccagcatcagtatttgaacatgctattggaccaataggaaaaaatatttttggagttgttattttcgcagccgcaatgtcatcagtgattggttcagcatatacaagtgcaactttcttaaaaacattacacaaatcattatttaataaaaataatttgattgtcattgtcttcatcgtgatttcaacaataattttcttattaattggaaaaccaattagtttattgattattgcaggagcaataaatggatggattttaccgattactttgggtgcaatattgatagcgagtagaaaaaaatcaattgttggagattataaacatccaatatggatgttagtatttggcattgtagcagttattgttacaattataacaggtgtattgtctctacaagatttagctactttatggaaaggttaaccataaataaatatgtaatttaaaatttaactgtcgacagtgtttaactgtatcgacagtttttttattaaatatttttcaagatgatttaataaaaaaagttagtcgtgatgaactagaaattatgttagaataacatgtgctaagattaaagttgaggtgtaaatatgattggaattattggagctatggaagaagaagtagcgattttaaaacataaattagtgaatttaaatgagattgaagtagcacatgtaaaattttatcgtgggcaactaaataataaagatgttgtcttaacacaaagtggaattggaaaagtaaatgctgcaatttcgacaacactattaattgaaaaatttaaacctacattgattataaatacaggttctgctggtgctttagatgatagtttatcagttggagatattttaattagtaataatgtgatgtaccatgatgcagatgcaactgcctttggatacgacatcggtcaaatacctcaaatgccagctcaatttgaagctaaccaacaattactccaattaactgaaaaagttgtaaaacaacaaaatttaaccgctaaaattggtcaaattgtaagtggcgatagttttattggtagtagtgaacagcgattaaaaattaaacgtcagttttcaaaagctatggcagttgaaatggaagcaacggctattgctcaaacttgttatcaatttaatttaccttttatcgttactcgtgctgtttctgatttagcaaatggggaagcagagatgtcgtttgaagagtttcttggtaaagcagctcaatcatcaagtaaaattgttgaacagttggttaatgaaatataaaaaataaataacttaaaggtgaaatgaatgggattaattaaaacatattttatgcctaatgattatgtacaatctgtatttcaaattgatattgaaaaattagcaaattctggttttaaaggtattattacagatttagataatacattagtaggttgggacgttaaaacaccaacgaaagaaatacaagaatggtttaaaaaggcaaatgatttaggtttaacgattacaatagtatcaaataataatgaaaaacgtgtttccggtttttcgaaagacttagacgttgattttatctttaaagctagaaaacctatgggaagagcttttaaaaaagcgatacaacacatgaatattaaaccagaagaaacaatcgttataggtgaccaaatgcttacagacgtacttggtggcaataataacggtctatatactatcatggtagttcctgtcaaaaagacagatggatttttaactagactaaatagaataatcgaacgtcgattattaaactattttaaaagaaaaggttatattacatgggaggaaaattgattggatgaaactttaaaatgtatcggttgtggcgctcctttacaatctgaagataaaaacgcacctgggtatgtgccagaacataatttatttagagatgatgttatatgccaacgttgttttagattaaaaaattataatgaaatacaagatgtaggaatggatagtgaagattttttaaatttattaaatggattatccgatagacaagggattatcgttaacgtagttgatgtttttgactttgaaggatcgtttattaatgctttaaaacgaattgtaggaaataagaaaatcattttggcagcgaataaattagatcttttaccaagacaaattaaccaacgtcgtgtaaaagaatggttaaaaagaacagctagaaagtatggattagaagctgaagaggtggtattaatatcagctcataaaggatggggtattgatgcacttttagaatcaatcaaccgttttagaaatcatcaagatgtttatatcgttggtactacaaatgttggtaaatcaactttaatcaataaattaattgagcaaagtgtaggtgaaaaagatgtcgttacaacatcaagatttccaggtacaacattagatatgatagatattcctttagatgagaaaacttttatgtatgacacacctggcattatacaagcgcatcaaatgacccattatgttactgaaaaagaattaaaagtgattattcctaagaatgaaattaaacaacgtgtatttcaattaaatgagggacaaactttattcttcggtggattagctaggatagattatgtttctggtgggaaacgaccacttgtatgttatttttctaatgatttaaatattcatagaactaaaactgaaaaggcaaatgatttatggcgaaagcaaataggacatttattaagtccacctagtaatccagaaaaatttaatataagtgatatgaaagctgtacgtctagaaacagggaaagaaaaacgtgacattatgatttctggattgggctttattacaatcgaagcaggtgcaaaagtgattgtccgagttcctaaaagtgttgatgttgttttaagacaatctattatgtagggaggattcataatgaaatttgcagtgataggagatccgatttcacattcattatcaccagtgatgcataatactaattttaaagttttaggtttaaatgatacttatgaagcattgcatttaccggttcaagatttcgataatattaaagaaataataactgaaaaaaatttaagtggatttaatgttactattcctcataaagaacgcatcattccattcttagatgatattgatgaacaagctaaagctgtaggtgcagtgaatactgtgaaaatagaagggaataaatggattggttataatactgatggtcttggatacgtaaaaggattaaaacaagtatatcctgacttatctaatgcatatattttaattcttggagctgggggcgcaagcaaaggtattgcaactgcactttcacaatgtgttcagcctaaattaactatagcgaatagaacaatgagtcgctttgataattggaaattagatattaatgcgattaccctacaacaagctgaacaatatcttgatgagtttgatattattattaatacaacatcagcaggattagataataataaagagagtgtaattcgtctcgatcaattatcaccgaatacattggtaagtgatatcatttatattccctataaaacatcatttttacaacaagctgaagagaagggtaaccctatttataatggtctagatatgtttgtatatcaaggtgctgagagctttaaaatatggactggcaaagatgctgaaattaaagaaatgaaattagcagttttaaatcaattaaaaggagaataatatgctatgctaacaggtaaacaaaaaagatatttaagaagtttggcgcataacattgatccaatttttcaaataggtaaagctggaattaatgataatatgattagtcaaatagatgaaacactagaaaatagagaattaattaaaattcatatacttcaaaataattttgatgataaaaacgatttagcccaaacgctaagtcaagctactaatagtgaagtggtccaagtcattggatcaatgataatcatttatagagaatctcaagaaaataaggaaatttcattaccataattctatgaaaaaaattgttttatacggcggacaattcaatcctattcatactgcacatatgttagtagctaatgaagtatttcataaaattaaaccggatgttttctattttttaccaagttatatggctccacttaaagaacataacgattacttagatgctcattatcgcatcaaaatgattaatatggtaatcgagcagttaggtttcggaaatatttgttatgcagaattagaaagaaaaggtcaaagttatacgtatgatacattaaaagctttaattgaccaaaatccttacgataagttttattttgtaataggatcagaccaatatgatcaacttgataaatggtataaaatagatgaattaaagcaaatgattatctttatagtagtaaatagagaaaaaaatattcaaaaggttgatgaaaatatgatttccatatctattccaagaatggatattagttcatcaatgattagacaacgtgtaaaagataaaaaaacaattgatattttagtccctcgaaatgttagtaaatatattagagaggaaggattctatgaacactaaagaagcaaaaaaacttatcgaaaataaattgcccgaaaagcgttttaaacattctcttagagtagctgacacagcagttaagcttgctgaaatctatgatggagataaaagtaaagcagagttagcaggcattttacatgattattgtaaatatgatgatttaggaaaaatgtatcaagtcgttcgccaacatgatttagatagcaatttgttaagttatggaagtgaaattcttcatggacctgtatgtgcagcattaatgaaggctgattatggcatcgaagatgaagaaacattattagccattaaatatcacactactggtcgtaaagaaatgacaaaaactgaaaaattggtatttattgctgactatatagaacctggtagaaaaactccaggagttgaagaaattagagatatggcatacaatcaaggtagcttagataaaacaatttatgaaatatcaaagcgaacagtgttatttttaattagtaaagatattactgtttatggttctacaattgaatgtttaaattattataattatagtgatcaaaagataaaggatgattaaatgaattcagaagaattattaaatattgctgtcacagcgacagaagataaaaaagcagaagatattgtttctcttaatatgcaaggtattagtgatatgactgattattttgtagtgtgtcacggtaacaatgaacgtcaagttcaatcaattgctagagcagtaaaagaaaaagtacatgaaaataatattgaagtaaagcgtatggaaggttatcaaagtgcaagatgggtcttaattgatttagcagacgtagtagttcatattttccataaagatgaacgcaattactataatatagagaaactttatcaagatgctccaatagaatcatataatcaggtagcatattaaaatgatgcaatacaccgaaatgagtaaagtttatgatcagcttactcaagatcaaccttatgaagaatggtttaatattgtaaaatattatacaagaacaatgtcttctaatgattcaataaatattcttgatattggttgtggcactggaagtttaacgcaattacttccttctattggcacggttacgggcatggatttaagtacagacatgttatctattgctgcaaataaatctaatcaagttacttggttagaaggtgacatgaccgatttttcattaaatacaacatatgatgttgtaacaatattttgtgattccctgaattatttacctgatattgatgatatcgtaaatacgtttaattgtgtatttaatcatttatctgatttaggaatgtttatattcgatattcatacgatatataaaatgaacacagcatttaataatcaatgttatattgatgataatgatgatatatttttagcgtgggaagctataaagggtgaagaaccttatagtgtttatcatgatatgagtttctttttaaaacagcataatggtaattatcaccgttttaatgaatcacattatcaaagaacatttgaaaaggatttctatattcgattgttaaaacaaactggatttaatcgtattgaaacttttgtagactttgacatcaataatcataatgaaaaaggtgacagattgttttttgttgcttataaataaaataaagtaaactcatcttcttatacgtttatacatataaggagatgagtttttgtttaagtatagaaatgaaataattcaattgttaactaagtggaagactcatatcatcattttaattgcagtagtgttactttttatagtgattctcatgcttatgaaaaataatgagccttcagaatatatgacaacatctaatgctaacaatagccaatttaataataatgaaaaatataataaaaataaaaatgataataatttatccacttcttctaaagaaaattcaactatttatgtagatgtcaaaggagcggttaaattaccagatgtttataaaatgaaaaagaacgatagagttaaagatgtactaaaaaaagctaaagtttctgaaaatgctgatattacaaaaatcaatttatctgaaaaacttactgatcaaaaaatgatttatatacctaataaaaatgaaacgaaactaaatgctacactcactaatcaaagtaatttagatacttctgaaagtattaaagtcaatcttaacacagcaaatgaaagagaattgcttaatgttccaggtataggtccaactaaagtgaaagagattattaaatacagagaggaaaagggacaatttaataaggttgaagacttaaaacaagtaagaggaattggagggaaaactttcgagaaacttaaagattactttactacataaattaaattggaagaatttttaatataaattataatagatatatatttttttaaggagttgaactttatggatagaataaaatgggacgaatattttatggcacaaagccatttgcttgcattacgttctacatgtcaaagactatcagtaggcgcaacaattgtaaaggacaatagaataattgcaggaggttataatggctcagtagcaggagaagttcactgtattgatgtaggatgtttaatagaagatggtcattgtattagaaccattcacgcagaaatgaatgcattattacaatgcgcaaaacaaggtgtatcatcagataatgcaacgatatatgtcacacattttccttgtttaaactgtactaagtctattattcaagcaggtattaagaaaatatactatgcaaaagattatcataatcataaatatgctattaaattattaaatcaagcaggtattgagtatgaaaaaataccattttctgctaataaaatagctgaatttttaactaaagaatgttagttgttttatatgcactttcttttttaagtggtatattatgggttcatcttaaattattttcaattttaatatttgctattatattaattattgtgtatcgaaagagtattcctttataccactatttattaattttatcctttttctttctagctttatttcaagtacaccatactttgaaaacaaatcattttatactccaaaatttaaaagtccacagtaatataaattcaaaagtaacgtttcaaaatgatataaaacaattcaatcaaattattaaaggacaatttcaatataaacataataattatcactttacttttaaaagtccacaattgaaagctaaagatttaaaaaatcgagaatgtaaaattaatggaaatatcacaaatagtattcataatgaagtctatgtttatatcgatcaaatagataataaacattgtactaaagttaatcatataagttttatagataaacacctaaattatattcaaaacaagttataccattcttcgttaaaatatccagagagagtcttagctttaattactggagatactagtgcaattgatacagattacttagataaagttaaagcgataggtatttatcatttacttgctgtcagtggatcacacgttgctaccattatttttatcattcaatatagtttggtcaggtttaatattccaaaattattcatacgaatttttattattatgatactaatactatttattttttatacaaattttgcaccgagtgctataagagcagttttaaccgctattactttttttattatccctaagacttttaaaatttcgtctataagtgtattatcgttagtctttttatttatgacaatttggaatatgaattttgcttatgacattggatttcaattttctttcatcatttctttttttatactattttctaagccattatttaataatcaatcaattttaaagaattatatttatataacaattatcgctcaattttcatccatgattattagtatttaccattttaatcagtttcaatggattggttttatttctaatgtaatatttgtcccattatattctttcattatttttccactttctattgttctatttactttctatcatttctttagtgacttgcgatgtataaatatggttgcaaatcaattatttgaactgcacgataaaataatgcacccgttcattttatttagaaattaccaaataaatattgctgatcaatcaaatttaagtctactctactgtttcattttattaactctactaactatatttatatgttataaaaattatagagcattcttaattataattatcttatttataatatttataagattaactaatcaaccattagcgacgacgtttactgctttaaatgttggtcaaggtgatagttttctttttcaaacaaaaaataatgaaactgtgatggtagatactggtggtaaagtagttcaaacgaagattaaagataatcataatattgcgaaatatcatattattcctactttaaaatctagaggaatatcaaaaattgatcacttaattcttactcatccacataatgatcatataggcgaatttccttatttagcacaaaatataagaattaaaaatttatatttatatataaaaagttattcagtagatcaaattaaaactatacatacattttgtagtatatatcatataaaagttattgatgttttagagactaataatattcagttgaaagaagctaaaatatcatttttaaatgcttttattgattccaatgaagacaaaaatgcacaaagtataatttcattaatagagtacaaaaattacaaattattattgatgggcgacgcaattgaagaaaatgaaaatttattattaaagaaatatcatttaccgttaattgatgttctaaaagttggacaccatggcagtaaaacaagtagttcaaaacattttttagaaatcatacaacctaaaattagtatgatttcaagtggaaaaaataatacttttcatttgcctaataacgaaacgatagataaattagagaaaattaattctcatatctacaatactcaaactgatggagaaattactttaaatctcgataatcaacttatatcatcctttaatagaagttaatgatagagaataataattacacaatgctataataacttaatggtataattttgaaagggtgcaagtttacatggctaataatataatggctatatacggagaagtgccagaactagtggagaaaaaaagtaatgaaatcgtagaaagttacttaaatgaaaaaaaagacgattttaactatgttaaatataatctttatgatacaagttttaatcagattatagaagaagcattaacaatgccttttatttcagagaaaaaagctattgttgttaaaaatgcttttatttttacaggtgagaaagtttcaaaagatatccaaccgaacaacgaacaagtaaatgaatttttagaaaaatatgatggagaaaactttatcatttttgaagtgtatcaaaataaattagatgaaagaaagaaaattactaagactttaaaaaagacaagcaagctagctaaagttgaacagatgtctgaacaagagattaaaaattggataaaaaataaacttcatgaaaattttaaagatattaaacaggatgcattagatttatttatagaattaactggtattaactttaatatagtttcgcaagaattagaaaaaattattttattcttaggagagcgaacaactataaataaaaaagatgttgaagagattattaatagaagtttagaacaaaatgtttttcttttaactgaatatatacaaaaaggggaaaaatataaagccattcaacttattaaagatttaatagtaatgaaagaagaacctattaaactattagcattaataacaagtaattatcgattatattatcaatgtaaaattttaagtcgaaaaggatatagcggacaacaaattgctaaaacaattaatgtgcacccataccgagttaaattggctttaaatcaagtaaaacattatcaattaactcatttgctaaatattattgatcaatgtgcagaaactgattataagttaaaatcctcatatatggataaacaactgattttagaattatttattctttctttataaataaaaaaagttcaagctaatcgcttgaactttttaaatgattatttgcttgaagacattaattgagatttaatgcggtcagctttatttgaatgaattaagttactgtgtgcagctttatcaactgatttaattgcgaagttaactaattcagctttattatcagcattattttcaattgctgatttagcatttttcactgcagtacgcatagcgtttttttgtgaaatattacgtgcttcagcagtttcagttgttcttacacgtttaatagcagatttaatatttggcattactgtcacctcctaaaagtgatctaagcatatcaaattttattttgattacaacaagaaatattttatcaaaacatgaatatttgtgcaatcatttattaacattaaacctatttatttacaaaaagaacgatattaactattggaaacctttatacaacactttataattgttatgtagtttaagaaaaatcttaaaattaaaagtaaataaagaatcttcacatgatgattcttttctcttaaatttgcaaataatgattaaaaacgatattatgtcaaagatgtatacatatacgggtaaatttacgaaagcgagaatgataagttatggatatgcaagaacgctataaccgaagagataatataagaaacttttctataattgctcatattgatcatggtaaatcaacgttagcagatagaattttagaaaatactaaatctgtagaaactagagaaatgcaaaatcaattgcttgattcaatggatcttgaaagagagcgcggtattacaattaaattaaatgctgttagattaaaatatgaatctaaagatggacagacttatacgtttcatttaatcgatactccaggtcacgtcgatttctcatatgaagtttctcgttcattagctgcatgtgaaggcgctattttagtagttgacgctgcacaaggcatcgaggctcaaactcttgctaatgtttacttagcactagataatgatttagaactcttaccggtagtaaataaaatagatctacccgctgctgaaccagaaagagtaaaacaagaattagaagatgttattggcttagataaagatgaagttgtgttagcaagtgccaaatcaaatattggtatcgatgaaatcttagaaaaaattgttgaagttgttcctccaccagaaggagatcctagtgcaccgcttaaagctcttatttttgattcagagtacgatccttatcgaggcgttatttcttctattcgagtaatggaaggtgttgtaaaagctggagatcgtatcaaaatgatggcaacaggaaaagagtttgaagttactgaggttgggattaatactcctaaacaactaccaattgaagaacttacagtaggcgatgttggatatattattgcaagtattaaaaatgtcgacgattcacgtgttggggatactatcactcatgtagatagaccagcagatgctccgttaaaagggtataaaaagatgaatccaatggtttattgtggattgttcccaattgataataaagattataacgatttaagagaagctcttgaaaaacttcaattaaatgatgcatcattagaatttgaaccagaatcatcacaagcactgggatttggatttagaacaggattcttaggtatgctacatatggaaattattcaagagagaattgaacgagaatttggaatagaattaattgcgactgcaccttcagttatatataaatgtgaaatgaatgatggttcagaagttacagttgataatccatctcaaatgcctgaacgtgatagaattaaagcgatttatgaaccatatgtaaaagcgacaatgatggtgccaaatgactatgttggagcagttatggaactgtgtcaacgtaaacgtggccaatttataaatatggattacttagatgatatccgtgtgaatatcgtttatgaaattccattatcagaagttgtatttgatttctttgaccaattaaaatctaatacgaaaggctatgcttcatttgattatgaatttattgaaaataaagaaagtaatttagttaaaatggatattttattaaatggtgacaaagtagatgcacttagttttatcgttcacagagattttgcatatgaacgaggtaaagctcttgttgaaaaattaaaaacacttattcctagacaacaattcgaagttccagttcaagctgcaataggtcaaaaaattgtggcccgaactaatattaaatctatgggtaaaaacgtgttatctaagtgttatggtggagatatcagccgtaaacgtaaattacttgaaaaacaaaaagctggtaaagcaaaaatgaaagctgttggtaacgtagacataccacaagatgctttcttagctgttcttaaaatggatgatgaataggttattaatgcgaggctggaacccagaatcatgtgttccaacctcgtttgtgttttaaaaacttaaaaatgagggtgtaacgatgtcaataaaaagtgcatatattcatatacctttttgcgttaggatttgtacatattgtgattttaataagtactttattaacaaacaaccagtagatgagtatatttctgcattaattaaagaaatgaaaacaagtgaaattagaaatcttgaaacaatgtacgttggaggaggtacgcctacagctttaaatctcaagcaacttgaaagacttttaaaagcaatacagtcaactttttcaattaaaggtgaatatacatttgaagcaaatcccgatgaattaaccttagataaagtgaaattactacactcatatggtgtaaatagaatttctatgggcgtacaaacatttaaaccagaattactaaaaattctaggtagaacacataaaactcaagatatatataatgctgtagagtatgctagaaaagcaaatattgaatcgattagtttagacctaatgtatcatttaccaactcaaacattagaagatttttcagatagtcttaatagagcaatacaaatggatatagatcatatttcaagttatggattaattttagaacctaaaactcaattttataatatgtatcgaaaaggcaaattaaaattgccaaacgaagatataggagctgaaatgtaccaatatttaatgaatgttttaggagaaacctcatttaaacaatatgaaatctcaaatttcgctaagtctcatcatgaatcaaggcataataagacttactggctaaatgaagaatattatggttttggagcaggcgcaagtggatatgtaaatggggaacgctattcgaatctcaatcctgttaatcattacatcaatgctattaataatcatcaacgtcctattttaacttccaattttcctactcattcagaaagaatggaagaagaaatgtttttaggattaagaatgaataaaggtgtcgataaagttaaatttctttcaaaatttggtacctcaatggataaagtatttggtgagacaataaataatctgaaaaagaaaaatttactttatgaaagagataaccatatttcattgaccaataggggaaaaatcattggaaatgaagtttttgaagcatttctattaaattaataaatttttttgaaaaataagagctttaacgttgacttactttgaccaatttgttaaattataattagcacttgagacaaaggagtgctaatgaggtgaagacatgattacaaataggcaattaagcattttaaatgcaattgttgaagattatgttgatttaggacaaccgataggttctaaaaccttaattgatagacataacttaaatgtaagcccagctactattagaaatgaaatgaagtatttggaagagttgaattttttagaaaaaatacattcatcttcagggcgtgcaccttctgaacaaggttttagattatacgtcaatcaattgttaaaacaaacatctcatcaaaaacaaaataaagttcaacgtttaaatcaacttttgattgagaatcattatgatatttcttcagcccttagttattttgctgatgaattatcaataaaatctcaatatgcaacgttggttgttcgacctaatcacaaaacagatattataaataatgttcatttgattcgtgcaaattcgtctataattataatggtcatcatctataattctggacatgtagaacatttacatttaagtgaatcaatggagtttgacgatgaaaggttaacaaggatttcaaattttctgactgataattattataaaagtcaatttgattttaataagaaattaaaacaatttacaaattctatggcggaacaatcctttataaatgaattaactatcatgctaacttctcatctccataaacaaagtaatagcatttttatgggtggaaaggttaaacttattgatgcactgaacgaaaccaatgtttcttctattcagccaattttacaatatctagaatcagaaaaaattatcgagttactagaagatatttccacttctgaaattaatgttaaaattggccacgaaatagatgaagggttaagtgatatttcaattataacgagccagtaccattttgatgatgcactaaaaggacaaattgcggttatcggaccaactgcgatgcattatcaaaatgtgattcaattacttaatcaaatatggtgaatctaattgtaattatattggagggcataaaatgacagaaaaagacgaatcagtgaaaaataacactgaacatactgaagaaaatgaaaacgttaaaaacgaagcgtcgtcttcaaatgatgtagaaaataatccttctgaagaagaattaaataatgaatctacatctgaacatgataatgatgataaaaatgatcaatctaaagacgaagaaattcaacaattacaattaaaagcaaatgaaaatgaagaaaaatatttaagattatatgctgaattcgaaaattataagcgtcgaattcgaaatgaaaatgaaacaaataaaaaatatcaagctcaacccgtgcttactgatattttacctactatcgataacattgaacgtgcacttcaaattgagggtaatgacgaatcatttaaatctctcaaaaaaggcgttcaaatgattcatgaaagcttattaagagcattaaaagacaatggcttagaagaaattgagtctgaaggtcaagaattcgatccaaacttccatcaagctgttgttcaagatgacaatcctgatttcaattctggtgaaatcactcaagaattacaaaaagggtataaattaaaagatagagttttaagaccatctatggtcaaagttaatcaataagatttaaatttgaaaaatttttaaaattggaggaattttattatgagtaaagtaataggtattgacttaggtactacaaattcttgcgtatctgtattagaaggagacgaacctaaagtaattcaaaatcctgaaggtgctagaacaactccatcagttgtggcatttaaaaatggagaaactcaagtaggtgaagttgctaaacgtcaagcaattacaaacccaaatactgtacaatcaattaaacgtcatatgggtacagattataaagtagatattgacggcaaatcatatacaccacaagaactttcagcaatgattttacaaaatttaaaaaacactgctgaaagttatttaggagataaagtggataaagcagtaattactgtgcctgcttatttcaatgatgctgaacgtcaagctactaaagatgctggtaaaattgctggtttagaagtagaacgtattattaacgaaccaacagctgcagcattagcttatggtttagataaaactgaacaagatcaaaaagttttagtatttgacttaggtggcggtactttcgacgtttctattcttgaattaggcgatggcgtattcgaagtattatcaactgcaggggataacaaacttggaggggacgactttgaccaagtaatcatcgactatttagtatcagaattcaaaaaagaaaatggtgttgacttatcacaagataaaatggcgttacaacgtcttaaagacgctgcagaaaaagctaaaaaagatttatctggtgtatctcaaacacaaatctcattaccattcatttcagctggagaaaatggtccattacacttagaaatcaacttaactcgttctaaatttgaagaattagctgattcattaatcagaagaacaatggaaccaactcgtcaagcacttaaagatgctggcttatctacttctgaaattgatgaagttatcctagttggtggttcaactcgtattcctgcagtacaagaagcagttaaaaaagaaattggtaaagaacctcataaaggtgtaaacccagatgaagttgttgcaatgggtgctgctatccaaggtggcgtaattactggtgatgttaaagacgttgtattattagacgtaactccattatcattaggtatcgaaattatgggtggtcgtatgaatacgttaattgaacgtaatacaacaattccaacatcaaaatctcaagtatattcaacagcagctgacaatcaaccagcagtagacattcacgtattacaaggtgaacgtccaatggcttcagataataaaacattaggtagattccaattaactgatattccaccagctccacgtggtgtacctcaaattgaagtaacatttgatattgataaaaacggtatcgtaaacgttactgcaaaagacttaggtacaaataaagaacaaaatatcactattcaatcaagttctgcattatctgatgaagaaattgatcgtatggttaaagatgctgaagaaaatgctgaagcagataaacaacgtcgtgaagaagtagacttaagaaacgaagcagacagcttagtattccaagttgaaaaaacaattaaagacttaggtgaaaatatcagtgaagaagacaaatcaaatgctgaaagcaaaaaagatgcgcttaaatcagcattagaaggtcaagatttagatgatattaaagctaaaaaagaagaattagaacaagtaattcaagaattatctgctaaagtatatcaacaagctcaacaagctcaacaacaagcacaaggtagttcacaacaatcaaatgatagcaatgttgaagacgctgagttcaaagaagttaaagaagacgaagataaaaaataaagctaatcgtttataacatttactatgtaaacatttataaatgtaagccaaaaagtcaaagtcaattgaacattggctttgactttttcttttatagttaagatacttgagtatgtgtttaaattataaaatttagaaagggagagatacttgtggctaaaagagattattatgaagttcttggcgtaagtaaagatgcttcaaaagatgaaataaaaaaagcatatcgtaaattatcaaaaaaatatcatccggacatcaataaagaagaaggcgccgatgaaaagtttaaagaaatttctgaagcatacgaagttctaagtgatgacaataaacgtgcaaattatgatcaatttggacatagcggtgcccaaggtggatttggtagtcaaggatttggtggacaagacttcagtggcttcggtggaggctttgaagatatatttagctcattctttggtggttcacgtcaaagagatccaaatgcacctagaaaaggtgacgacttacaatacactatgactttagaattcgatgaagctgtttttggtactaaaaaagaaatttctattcgaaaagatgttacctgtcatacatgtcatggtgatggtgctaaaccaggcacaagtaaaaaaacatgtagctattgtcatggttcaggacatgtatctgttgaacaaaatacaattttaggacgcgtaagaactgagcaaacttgtcctaagtgtgagggtagtggtcaagaatttgaagaaccatgtccaacttgtcatggtaaagggactgaaaataaaacagtaaaattagaagtaactgtacctgaaggtgtagacaatgaacaacaaatccgtcttgctggtgaaggtgcacctggtgaaaatggcggtcctcatggtgatctttatgtagtattccgtgttaaaccttctgataaatttagaagagatggcgatgatttattctatgaacttaacattagcttcccacaagcatcacttggcgatgaaatcaaagtaccaactctaaacagtaatgttatgcttacaattcctgctggtactcaaactggtaaacaattccgtcttaaagagaaaggcgttaaaaatgttcatggatatggacatggtgatttatttgttaatataaaagttgtcacaccaaataaactaactgatagacaaaaagaattaatgagagaatttgcggaaatcagtggtgaaaatccggaagaacaaccttctaattttaaagacaaagctcgtaaattctttagaggtgaataatcatgaactggacagaatttgcagtcactgtaaatcatgaagttgaacctttagtcactaacatattagaaaactatggttcaaatggagtagttatagaagattcaaatgatttaattaatcaacctactgataaatttggtgaaatctacgaattaaaaaaagaagattatcctgaacaaggtgtgagattaaaagcatactttaacgaattgaaatataacactcaatttaaaaataaattaaaaaatgaaatattaaatttggaccttatagatgattcagtagttgagttttcagcaaagactattgctgaagtagattgggctaatgaatggaaaaactattttcatccttttagagcttctgagagatttacgattgttccaagttgggaagattattcaaaagaatcagaagatgaattgtgtatagaattagatcccggaatggcttttggtactggagatcatccaacaacaagtatgtgtctaaaagcgattgaaacttatgtaacaccagattcttcagttattgatgtaggtacaggttctggtatattaagtatcgctagtcacttattaggtgttaaaagaattaaagccttagatatagacgaaatggctgttggtgtggctaaggagaattttagaaaaaatcattgcgaaaatgctattgaagcaattcccggtaatttattaaaagaagaaaatgaaaaatttgatgtagttatcgcaaatattttagctcatattattgatgaaatgattgaagatgcttataatacactaaatgaagatggttattttataacttcaggtattatagaagaaaaacatgaagatatactgtcacatatgaagcgtgttggatttaatattgtatcaatcaatcatgacaatggatgggtttgcattgttggtcagaaagtgagtgaataatttgcaacgatactttatcaatcaaaacgctgatgagaatcagcgtttttttattaccaatgaagaagatatacatcatatcaaaaatgtaatgagaaatacgattggtaacaaaattataattaattttaatgataaaaaagtatttattactgaaattacacatataagttctaatcaaattgaagttttaccaataaaccaattagatattgacactgaattaccagttgatgtaacgatttgtagtggtttaataaaagctgataaatatgaatggttgcttcaaaaaagtacagaattgggtgccaatcattttatttcagtgggtatggatcgatctgtagttaaattacaagagaacaaggtacaaaagaaaatagatagatggcaaaagattgtaaaagaagctgctgaacaaagttatagacttgttattccagatgttaaatttcagtcgaatttaaaagtaatttatgataccataaataattatgactatgtgttaatagcatatgaagacgaagccaagcatggtgaaaaaagtcgatttaaaaatattttaaacaactttcaaacgaatgatcgtgtgttaatcatatttggacctgaaggtggtttttccgataaggaaattgatctctttagggaggtaagcttaaacattggtttaggccctagaatattaagagcagaaactgcgccactatatgcacttagtgctataagttttgagaaagaattgatggggtgaattaaatggcaacagtagcgtttcatactttaggttgtaaagtaaaccattatgaaactgaagcaatatggcaattatttaaagatgctaattatgaaagagtagattttgaaactaatgcagatgtatatgtcattaatacttgcaccgtgactaatacaggtgataaaaaaagtagacaagtcattagaagagcaatacgtcgtaatcctgatgcagtagtatgtgttacaggttgttatgcacaaacatcttctgctgaaattatggagattccaggcgtagatgtcgttgttggtactcaagacagacataaattacttagttatattgatcaatttagagaagaacgtcaaccaattaatggtgttggaaatattatgaaaaatcgtacatatgaagaattagatgtaccttattttacggatagaactcgtgcatctctaaaaatccaagaaggttgtaataacttttgtacgttttgtattattccatgggcacgtggtttaatgcgctctagagatcctgaaaaagtagttgaacaagcaacacaattagttcaatctggatataaagaaattgtattaactggtattcataccggtggatacggtcaagatttaaaaaattataatttagctcaattactcagagatcttgaggaaattgatggtttagaaagaattagaatttcttcaattgaagccagtcaacttactgatgaagtcattgatgttctaaaaaattctaataaagtggttagacatttacatgtaccattacaatcaggttcagatacagtattaaaacgtatgcgccgtaaatatactatggaacatttttctgaaagactaacaaagttacatgatgcattacctgatttagcggttacaagtgatgttatagtaggtttcccaggagaaactgcagaagaattccaagaaacatatgattttatagttaaacataaattctcagagttacatgttttcccgtattcacaacgtattggtacacctgctgcacgtatggatgatcaaattgatgagtcaattaaaaatgaacgtgtacataaacttattgctttaagtgaccaacttgctaaagaatacgcatcaaaatttgaaaatgaagttttagaagtgattccagaagaagtaggagaaacaaaagatacattagtaggttacgcagataattatatgaaagttgaatttgagggtagtgaggatttaatcggtgagattgttaaagttaaaattaataaagctgattatccaattaacattggtagtgcagttagaatcgttaatcatgctactaataaaactgaagaaggcgtattattataaatttttgaaattataaagatttataattgaccataattatttcatatattatactaaataaagcatagttaattatttctatgcaattattgactttaagtttcgttgatatttggagggagggaaatacagatgtctaaaacagtagtacgtaaaaacgaatcactagaagatgcattacgtagatttaaacgttcagtatctaaaagtggtactatccaagaagtacgtaaacgtgaattttacgaaaaaccaagtgtaagacgtaagaaaaaatcagaagctgcacgtaaacgtaaattcaaataattaatagctctgttgactccctcaacatgaatgttaattatatatatattctctcaattagttaaactaattgagagtttttttatacaattgtaatactataatatagtatttatttcatgtataatttaattgagagcgaggtgagataatgataagtataaatttgatacatatcgagaatacttttgcttcattgaatcattcatggttgggtgatatgtcaaatatcattgttaatcctattgttttattaattcttacatgtattatctttttaggttttttatatcaactttattctaaaaggataaatattttaggtattttagcttctctagcgttacttattctatttctagggtttttaattaatggcgatgtcaatttgatttcaattttattgtttttcataggtatcatcttagtaataatagaactattcattgttggagcagtaattggaattataggaatagtgcttattattgttagtatgattatgttaggagataatattttagttatgctctttaatgttattgtcgctttaatactttctattatagaatgggtgattttggtgaaagtgtttaatcgtaaaataccattttttgataaagtgatattgaatgattcaacgagtacagaagctggttatagatctcatgatgatcgttcttacttagtgggaaaaactgcgtatactactactgatttaagacctgctggaatcataactttagatgacaaaagaattgatgctgtttctgacggtacatttatcttgagaaataaaaaagtaaaaattttagaggtagaaggtagtagagtagttgtaagagaaataaaaatataaaaggagtaaagtcaatgttaaatattggaattataattattgcgattattataatagttgctttattattattattttcatttgtaccagtcggattatggatttccgctattgctgcaggtgtaaaagttagtattgctacacttgtaggaatgcgacttcgtagagtatctcctcgtaaagtgataggtcctcttattaaagctcataaagcaggactaaatttaacaacaaatcaattggaatctcattatctagctggtggtaatgtagatagagtagtggatgccaacatagcagctcaacgtgcagatatcaatttaccttttgaaagaggtgccgcaatagacttagcaggacgcgatgtcttagaagctgttcaaatgtctgttaatcccaaagtaatcgaaactccctttattgccggtgttgcgatgaacggtatcgaagttaaagctaaagctagaattacagtaagagctaatatttctagacttgtaggtggttctggagaagaaacaattattgcacgagttggtgaaggtattgtttctacaattggttctagtgaacatcatacacaagtactagaaaatcctgataatatttctaaaacagtattaagtaaaggattggattcaggaacagcattcgaaattttatcaattgatattgcagatgtagatatcggtaaaaatatcggcgctgatttacaaacggaacaagcactcgcagataaaaatattgctcaagctaaagctgaggaacgacgtgctatggctgttgcctctgaacaagaaatgaaagcacgtgttcaagaaatgcgtgctaaggtagtagaagctgaatcagaagtaccactagcgatggctgaagctttacgtaaaggtaatattggagtaaaagattactataatttaaaaaatgtagaagcagatacaggtatgagaaacgctattaataaacgtaccgaacaaaatgacgatgaatcaccaaattaaatagaggggtgattaaatgaatattggaattcttatattcgttatttctgtgattgttactggtattagtgcaatgagagataaaagtcatgaacaacgaaaaaatcaaacgcctccacacaaaaatacacaaagacctacgcaaaacacaccaagaaaaaaaggtatttttgaacagatagaagaagcttttaatgagatggcatcagaatttgatgaagaagaacaaaataaaaaaacatcatcaccaaaaccatcttctaaaaaagaaacggttcacagtgataaaaatcttaaaaaagaagttaagactgaacatcctcgtggagaattaaaacggtttgaaactaaacaatctcataccgaaaaagtgccttctaaagatagtgattcaacttcacgagagagatctcaaagtgaaaaagatattaaaaaacagttagaagactcgctatcaaaagaattatttaatgtgagatctgaaattgacaaagaaaaagaaaaacaactttctttaattgaaaagaaagctaaagaaattattaatgataagtacttatctgaaaaaacgaaacgttataaactgaatcaattactcaatagtaaatctattgaaaaaaatatgacacatcaaacgtttcaatttgacaatgacccgatagttgatgggattatttggcaagaaatactaaataaacctaaaaaattataagggttataaataaaagaataagacaacatttattgtttcattctgacctttacaagagactttctacgtggaagtctctttatttatgctcctaatatgttaagatgcgcctaaaacacatattgttcttggtactttttattatgttatattatcttaggttaattattcattcaaaacatttaaatttgtatactttatcattgtttagtaaaatttatatgaaagattaattattaatgaatatgttttatgtgaaaaggagcgcttttatgccaggaataattcaaatagataacatcaaccattctcaagctttaattggtaataatgatgaacatttaaaatcgattgaagaagcatttgatgttatcatacatgctcgtgggcaagaaattgcagtaaaaggtcaagtattagagcatgttgaaaaagcagaattagttcttaaaaatttattaaaggtaattgagttaggacattcaattacattaaaagatgttgaggctgccataaagatggctaaaaatgacactattcaatatctattggatttatatgatgaagagattactaaagatgcctttggtaaaacaattcgtgcaaaaacaatggggcaacgtctttatattaatgctatgaaacgtaatgatttagtgtttggtataggtcctgctggaacaggtaaaactttccttgcagttgtttatgctgcaaaacaattaagaaaaggaacagtaaaaagaattgttttaacaagaccagctgtagaagctggtgaatcattaggtttcttaccaggagacttaaaagaaaaagttgatccatatttaagacctctttatgatggtttaaatactgtcctaggtagagaacaaacagcacgttttattgaacgaggtacaattgaaattgctcccttagcgtatatgaggggtagaactctagatgatgcatttgtcattttagatgaagctcaaaatacaacacatgcacaaatgaaaatgtttttaactcgtctaggatttggttcaaaaatggttgtaactggagaccaaactcaaattgacttaccaaaaggtgttaaaagtggattaaaagaagctattaagaaccttcgtggtgttaaaggaataaatataatggaactagatcaaagtgatgtagtacgacacccattagtaagtaaaattatcgaacgttatgaaggagacaattaaatgtttacgattgatttcaatgatcatacaaacttagttaaagatgaatggtatcatcaaatcgaagacttaattaactttgctaaagaaaaagaaaacattcatgaagatgctgaattgtcagttacttttgtagataaagatgaaattcaagaaataaataaaaattatcgagataaagatagagtgactgatgttatttcttttgcacttgaagaagatgaaccagatattattggtttagatattcctagagtgttaggagatattattatttgtactgatgtagctaaggaacaagctgaatcttataatcattcatttgaaagagaacttggttttttagctttacatggttttttacacttattaggatatgatcatatgaatgaagaagatgaaaaagaaatgtttggacgccaaaaagaaattttaaacgcatatggattgactagagattaaatttttaaaacgatttaaatacacttttgatggtttaaaaacacttcttcaaaaagatcacaattatctaatacacttaatattcgcattcatagctatcattttaggaattatcgttagactttcaactgtagaatggttgtttattttgttaagcatcactttggtacttacgcttgaggctgtgaatacagctatagaatgcgtcgtagatttagttacttctgactatcacgaattagctaaacaagctaaagatattgccgcctttagtgttatggttgtttcaatctttgcactaattatgggtttaatgatttttatacctcacatctttttttaaaggggacaataaaatgagttatcaatcacattattttcaagaagttagaaaagctcaacaacgtgcttatgtaccgtatagtcattttaaagtaggtgcatatttaaaaacaaaagacggtcgccatttttatggagcaaatgttgaaaatgcagcttatccagcaacgatttgtgcagaacgatctagtttagtagctgcaatttcagaaggctatcgaccaggagattttgaatcaataacagttaccgttgacgctgaacatccgtcatcaccttgtggaacatgtcgtcaagtattaaaagaactctgtgatgacgacatgcctgtgtatatgacaaatcataaaggtgagatgattaagtcaactgtagcagaactattacctcacggcttttcgggaaaggatttagaataaatgacagaacacaaatcaggatttgtatctattatagggagaccgaatgtgggaaaatccacgtttatgaatagagtcattggacataaaattgcaattatgtcagataaagctcaaacaacaagaaataaaattcagggagtaatgacaagagaagatgctcaaatcattttcttagatacaccaggtattcataaacctaagcataaattaggagattatatgatgcgtgtagctaaaaatacactatcagaaattgatgctattatgtttatggtaaatgtaaatgaagatattggtcgtggtgacgaatatataatggaaatgctaaaaaatgttaaaacaccagtatttctagtgttaaataaaattgatttagttcatccagatgcacttatgcctaagattgaaaaatataaaacctatatggattttactgaaattgtgccaatttcggcacttgaaggattgaatgtggatcactttatcgatgtacttaaagattatttacctgaaggtccaaaatattaccctgatgatcaaatatcggatcatccagaacaatttgtagtaggcgaaattattagagaaaaaatcttacatctaacaagtgaagaaatcccccatgcaataggtgtaaatgtagatagaatgattaaggaaagtgaagaaagagtaagaattgaagcaactatttttgttgaacgtgattctcaaaaaggaattgttataggtaagggtgggaaaaaacttaaagaagtcggtaaaagagctcgacgtgatattgaaatgcttctcggatcaaaagtttacctcgaattatgggtaaaagttcagaaagattggagaaataaagtaaactttattcgtcaaatgggatatgttgaagatcaagattaacgtttaaattaataggaaagccggtgagatgcattgttagaaaaacaaaaaggaattatcataaaatcagtagattatggtgaatccgataaaattattacaatattaaacgagcatggtgctaaaattcctattatggtaagacgtgctaagaaatctaaaaccggcttgcaagctcatacacaactctttgtgtatggcttatttatttataataaatggaaaggtatgggaacgctcagttctattgatgtcataaaccaatattatcaattacgattagatatttttgatagtagttatgcgactttatgcgtcgaagcaatagatcgatcattagaaccaaatgaagtttctttatatcattataagttattagaatttgtactcaataaaatttcagaaggtaattctgctcaattaatgtcgattatcgtattattgaaatgtatgaataaatttggttttggcgcatttttcgattattgtgcaattactggtgatactgatcaatctaagcttattgcttacagttttaaatatgatgggaccatctcagaaactgtattaaataatgatccttatgccttaaagctatccaataaaacattttatttattggatattttacaaaagttgccaattgataaaatgaatcattttaatattaaccaagctttattagatgaaatgtcagaattaatgataatgctgtatagagaatatgctggcatgtactttaaaggtcaaaaattaattaatcaacttaagcgattagaataatataaaatgtttaaattaattaaaagaacccacttattactcatagtaagtaataagtgggttcttgttatattaaaacttaactttttcagctaagaatgtttctaattctgagattggcatacgaacttgttccatagaatctctatcacgtactgtaacttgattatcttctaatgaatcaaaatcaaatgtaatacagtaaggagtaccgatctcatcttgacgacgataacgcttaccaattgattgtgattcatcaaaatcaacagaaaacttagaacttaattgttcaaagattttaattgcttcttcagataattttttacttaatggtaaaacagcagctttatatggcgctaaagcagggtggaaatgcattactgtacgagcatctttactaccttcaacgccttcttcatcataagcatcacataagaaagctaatgtaacacgatctgcccctaaagaaggttcaatacaatatggaatatatttctcatttgtttctggatcatgatatctgaaatcttcaccagaatgttcactgtgctttttcaagtcaaaatcagtacggcttgcaataccccataattcgccccaaccaaatgggaatttatattcaatatctgtagtcgcattagaatagtgagataattcttcttcatcatgatcgcgtaatctcatattttcttcattgatgtttaaatcttttaaccattgacttgcaaatgttttccagtaattttgccattcaatttcttcaccaggtttacagaagaattctaattccatttgttcaaattctcttgttctaaaaataaaattaccaggcgtgatttcattacggaatgatttaccgatttgaccaataccaaatggtaattttttacgcattgaacgttgaacatttttataatttacgaaaataccttgagcagtttctggacgtaaaaatagttcattagtagagtcctcagtaacaccttggaatgttttaaacattaagttaaattgacgaatatctgtccaattagcagtcccacttacaggacatacaatgccttcatcatcgataatacgtttcatttcctcaaaacttaagccatcagcaatgaaattttcgtcacctttttcattttgcatatagtcttcgattaatttatctgcacgatagcgaattttactatctttattatcaatcattgggtcgttaaaattacctaaatgaccagatgcttcccaagtttttggattcattaaaatggcagcatcaatcccaacattgtatggtgattgagtaatgaatttttgccaccatgcttttttaatattattttttaattcaacacctaatggaccataatcccatgtattagataaaccaccgtaaatatcactacctgggaatacaaatcctctatgcttagctagtgatacaatagtatccatatctttaaccatattatctctccttttaaaataaaaacgtcccaagacaataaataaatataaaataatacttattattatcttgggacgagttaataattcatctatataaatatatagtgttaacaaaataacccgcggttccacccaaattagtgtagacactcgcttttatgtaatgatattgataagccaatttttgaaatgttaagcttccaccgaccttaactcgcttaatcatattttaattcatagaaaattgaatagcaaggatttatatgtatttgtaggtatatatataaataggtataataaaaatgaaattaaaaggggtgaagacctatagaattaagtaaaagacaagaacaaataattgaaatagttaaagatggtggcccgataacaggtgaacatatagcagataaacttaatttaactcgtgctactttacgtcctgatttagctattttaactatgtctggttttattgaagctagaccacgtgtgggttattattattcaggtaaatctaagaataaattagtcagtgatcatttacgtcaatatataataaaagatcatatgtctctacctgttatcgttaaagaagatatgacaatttatgatgctatatgtactatatttttagaagatacaggaacattatttattactaatcaaaaagatgaattgattggtgtgagctcgcgaaaagatttgttacgtgcctctatgattgggcaagatattcatactatgcctataagtgtcatcatgtcacgtatgcctaatattgtttatttagaagaagaagacctcgtcatctatgcagcaagtcaaatgatagataaggaaattgattcaattcccgttgttagaaaaaaagaaaatagtaaatataaagttgtaggtagaatatctaaaacaacaataacaaaattatttgtttcattatttaaagaataggtgataaacaatggaaaatataaagataatcattgcatctgattcaataggagatacagctgagttggttgctagtgcttgcgtcgctcaatttaatcctaaagcttgtaaacatggttttttgagatatccttatatagaaacctttaaggatatagatgaagttatacaggtcgctatagataaaaatgcaattattgtatatacgttagtagaaccaaaaatcaaagcatatatgaagaaaaaagtagacgctttctccttaaaagctgttgatataatgggtcctctaatgacactacttaatcaaacgcacgatgaggagccgtataatcagccaggcagagttcataaattagacgatgcctatttcaaaaaaatagatgcaattgaatttgcggtaaaatatgatgatggcaaagatgcgaaaggattacctaaggcagatattgttttaattggcatttcaagaacttctaagacacctctatctcagtatttagcgcataaaagctataaagtaatgaacattcctctagttccagaggtaacgccaccagacgaattgtttaaaattaatccaaataaatgtatagcattaaagattagtgaagataaacttaatttaataagaaaacaacgacttaaacaattaggattaggtgagcatgctagatatgctactgaagatagaattaaagaagaaattcaatattttgaaaaaattgtcgaaaaaataggatgtcctgttattgatgtatctgataaggctattgaagaaacagcaaatgatgttatacaaatcattgaaagtaaagcataaatatttaaaaaccttctataaaagtgtataatactatgactactatttaataggtgatatatattgcgtatagaacagtctgtaatcaacgaaataaaggaaaaaacagatattttagatttagtaagtgaatatgtgaaattagaaaaaagaggacgcaattacattggtttgtgtccttttcatgatgaaaaaacaccttcgtttacagtttctgaagataaacaaatatgccattgctttggttgtaaaaaaggtggaaatgtttttcaatttattcaagacattaaggacatttcattcgtagaagcagtacaagaacttggagaacgcgttaatataaaagtagatattggtcattctaatccatctacaacgcagatagcatctgaagacttaaaaatgattgaaatgcatgaattaattaatgaatattatatgtatgcattaatgaaatccgtagaaggtgaagaagctttaaattatcttgtaaatcgtggtttcactgaagaattaataaaatctcgtggaattgggtatgcccctaataacgctcacttttgtcatgactttttacaacaaaaaggatatgacatagaactagcttatgaagctggtttgttatcacgtaacgaagaaaattttagttactatgatcgttttagagatcgcattatgtttcctttaaaaaacgctcaaggaagaattgtcggtttttctggtagaacttataacaatcaagagcctaagtatttaaatagtcctgagacaccgatttttcaaaagagacgattactttataatcttgatagcgcaagaaagtcaattagaaaaaatgatgaagtaatgttgttagaaggattcatggatgtaattaaagctgattacgctggattaaaaacagtagtagcaagtatgggtacagcattatcagaaaatcacattacagtgttaaaaaaattaacctctaatataactttaatgtttgatggagactttgctggtcaagaggccattttaaaaactggagaacatttacttaaacatggattgaatgtatttgtagtacaattaccaaaaaacatggatcccgatgaatatatagttaaattcggtaaagaaaaatttatagaatttataaataatgagaagaaatcgtttattatttacaaagttcaattctatcgagatgaaattgaaaataatgatctagcttatgagcgtcactttaaagagattactgaagatctttcatttgtcagatcttcaatattaaaaaataaaattgtgaatgacgtagctgacattttcaatattgatgccaatactattatgtccaatgtacatcaacaacctgaatttatctcatatgaagaagactatattggaaataccaatgataactcgaatttaaattctcaaaatttaaatattgtttttacacatttaaacaaaagtgaaaaagcacaaagagctttattaaaacactttatgatggataaagatgtatttctaaattataatcgacaacttgaagcaaatgattttacgaataaatatttccaaagtatttttaaagtgctaaccgattattattctgaaaatgattactattcgattagtgatttaatattatacattgaagataaagatattagagaagcaatcatacagcttgatgattatgaattaaatcgagaaccttatgatttagaaattgaagaatatatctcaactttaaatgaaaacaaatatgaagattctattgaagaacttaatcataaattaaaagaagcacttagaattggtgacgtagaatctcaaaagtattatttacaaatgatagttaataaaaacaagcaacgcatgtagatgaacatttaaattaaaggaatataaacaaatattaaacttttaatatagtatttatatttaataaccattactgtataatggttattatgcttttttaaagggtagagaaataataagttaaatatttatgaaataaggatatcattttattacctatagaatgataatatttcatgtttattataaaatatacttttcttattataataatttattatataattaaatatcttaattgaaagttgaaaatacgattgggaggccttttcatgtctgataaccaagttaaaatcaaaaaacaaacaattgatccgactttaacattagaagatgttaaaaaacaattaattgaaaaaggtaaaaaggaaggtcatctaagtcatgaagaaattgctgaaaagctgcaaaattttgacatggattccgaccaaatggatgatttctttgaccaactaaatgataacgatattagtttagtaaatgaaaaagatagttcagatacagatgaaaaattaaatccaaatgacttaagtgcgcctccaggtgttaaaattaatgatcctgtaagaatgtacttaaaagaaattggacgtgtaaatcttcttagcgcacaagaagaaattgaattagctaaacgtattgaacaaggtgatgaagtagcaaaatctcgccttgcagaagccaacttgcgattagttgtaagtattgcgaaacgatatgttggtcgtggtatgcttttcttagacttaatccaagagggaaatatggggcttatcaaagcagtagaaaagttcgattttagtaaaggatttaaattttctacttatgctacatggtggattagacaagccattacacgtgctattgctgaccaagctcgcaccatccgtattcctgtgcatatggttgaaacaattaataagcttattcgcgtacaaagacaattattacaagatttaggtcgtgatcctgctcctgaagaaattggtgaagaaatggatttaccacctgaaaaagttcgcgaaatacttaaaatagctcaagagccagtatccctagaaacgccaataggtgaagaagatgacagtcacttaggagactttattgaagatcaagaagcacaaagtccttctgaccatgctgcttatgagttattgaaagaacaattagaagacgttttagatacacttactgatagagaagaaaatgttttacgtttaagatttggccttgatgacggacgaactagaacattagaagaagtaggtaaagtgttcggtgttacaagagaacgtattcgtcaaatcgaagctaaagcgcttagaaaattaagacatccaagtcgtagcaagcgtcttaaagattttatggactaagattaatgctaaatctgagttaacgatagatgttatgtataaagaaatttgaggctaagacaatactatgtcctagcctctttttataataaaggagataacaatgatatcattaaatcatagattaaaagttgtaagccaatacttattacctaattcattagctgatatcggttctgatcacgcttatttacctatttatgcattacaacatcatctatgcgatgatgctattgctggtgaagtaataaaaggaccttatacagctgctaaaacgaatgtagcacagcatcaacttactcaacatatcgatgttcgattaggtgatggtcttagtattctaactgagaaagataaaatagataatgtcacaatttgtggaatgggtggacctttgatagcgaaaatattagatgagggtaaaaataaacttgcacatcatccacgtctaattttgcaaagtaatattcaaactgaaaccttacgcaagacacttcaacatcttaattatgatattattgctgaagaaattttagaagaaaaagggcatatctatgaaattgtagttagtgaatggaaagaaaatcttaatcttcttaataagaaatcacttaaatttggtcctattcttttaaatcataaaaacgatatttttataaaaaaatgggaaagagagttagcagctttagagtatattcgtaatcaattgaatccaatacaacatcatgagagactagaagagattgaagaagagatatcaatgataagagaggtgctctataatgaaaattaaagaactaatgtcaattattgaccaacatgttccccttaaaactgctgaaagctgggataatgtgggtttattaattggagatgacactaaagaaataacaggtattttgacagcattagattgcacaatggaagtaatagaagaggcaattagcaaaggatacaatacaattattgcgcatcaccctttaatttttaaaggtgttaaatcattagttaatgatggatacggtaaattgatacacatgcttattcaaaatgatattcaacttattgctttacacaccaatttagataatcacattgatggtgtcaatgagatgctagcaaaaaaattaaatttaactaatattagatttttaaatgaagaagaatctttttattataaagtacaaacttacattccggaagaaaatctagaatcatttaaatatcatataaataatattggtctagcaaaagaagggaattatgaatattgtttctttgagtccaaaggtaaaggacaattcaaaccagttggagacgctcgccctcatattggagaactaaatcgaattgaacatgtaaatgaagtgaaggtagaatttatgattcgtaaagatcaattaagtattgctaaaaatgcaattattaattaccatccttatgaaacacctgtatacgattttattaagatgacgacatctgctaattatggtcttggaaaaataggtgaactaaatgaaccattaaatttagaagattttgctaaatatgctaaagcacatttaaatattcctagcgttcgttatacaggtccttcagaagcgttaattaaaacagttgctattatcggaggtgctggtatcggttttgaaactagtgcttttaaaaagggagcagatgttttcgttactggagacataaaacatcatgatgcacttgatgctaaaactaatggcattcatttattagatatcaatcattatagtgagtacgttatgaaagaaggacttaaagacttactaggacgatggttatttaataatgatagtaagcagtttaatatagaagcttcagaaataaatacagatccatttaattatatttaaaacaatacaaaggaggccagatgaatggctaatcatccatttgaaatatttaatttaaatccaaatcttattgatgcagttaaagatttaaattttaataaacctactgaaattcaaaatagaattattccacgtataaaaaaagggactaatttaattggtcaatcacaaaccggtactggcaaatcacacgcctttttattacctttaatagatttaattaatactgacattaaagaacctcaaagtattgttgttgcaccaactcgtgaattagcacaacaattgtataaagtggctagtcatctagctagttttcaatcagatattaaagtaagtttatttattggtggtactgacatagagaaagataaacaacgaacaaatcaacaacctcaattagtgattggtacaccaacacgaatcaatgatttagctcagagtggacatttgcatattcataaggcatcatatttaattatcgatgaagcagatttactcattgatttagggttaatagaagatgtggattatattgctgctcgtttagatgaaaatgctaatattgcagtttttagtgcaacaattccaaaatcattagaaccgtttttaaataagtatcttagtcaccctgaatatgttgtagttgataacaaatcccaaaataaaaaaaatattgaattttatttgattcctactaaaggaactgaaaaagttgataaaactttacaattaattgatatactaaatccatatctatgtattattttttgtaacagtagagaaaatgcaaatgaacttgctcaatctcttaatgagtctggcattaaagtaggtatgattcatggcggtttaacacctagagaacgtaaacaacaaatgaaacgtattcggaatttagatttccaatatgttattgcaagtgatttagcttcaagaggaattgatattgaaggcgttagtcatgtagtaaattttgatgttcctaatgatattgatttctttactcatagagttggtagaacaggacgtggaaattataaaggcgtggctataacgttatatagcccagatgaagaacataatatttctcttattgaagataaaggctatcactttgataatgttgatattaaaaatggagaacttaagccaatcaaagcgcacaatacacgtcataaacgtgaacgtaaagatgatcatttaacaaatcaagtaaaacataaagtaagaagtaaatctaaaaataaagttaaaccaggctataaaaagaaatttaaacaagaagtagaaagaatgaaacgacaagagagaaagcaatacagtaaacaacgtagtagacaacaacgaaaaaacaataaaaaaggttaggtgaaacaaatgttaattggctcacatgtatcaatgagtggtaaaaaaatgttagaaggatcggccgaagaagcacatcaatttggtgaatcaacatttatgatttatacaggtgcacctcaaaatacaagaagaaaaaatataaacgatttaaatattgaaaaaggtcataaagttatggaacaatatggtttatccaatattgttgtacacgctccttacataataaatataggaaatacaacgaagcctgaagtttacgaactaggtgtgaatttccttcaaaatgagattgaacgcacgcaagctataggagcgaaagatattgtcttacatccaggtgcgcatgtaggtgccggtgcagataaaggaattaatcagattattaaaggattaaatgaagtattaacacatgatcacgatgtacgaattgcacttgaaacaatggctgggaaaggaacagaaattggacgtagttttgaagaacttgctcgcattattgatggtgtgacacataacgatcggttatctatttgctttgatacctgtcatacacatgatgctggttataatatcaaaaatgattttgatggcgttttgaatgagtttgataaaattattggaatagaccgtattaaagttgttcatgtaaatgatagtaaaaatgaacaaggtgcacataaagaccgacacgaaaatattggatttggatatattggttttgacgccttgaataatgtggtacatcatgaagcttttaaagacattcctaaaatccttgaaactccttatgtaggagaagataagaaaaataaaaagccgccttatcgctttgaaatcgaaatgttaaaatctcaaatttttgaccccaaattaaaagaaaaaatattgaatcaataattaaaataagagtaagatagcataatctacaaagaggctatcttactcttgttttaattcgtaaacattactatttacaaaaaacatatataattgtatagtatttagcgaggtgaaaagatgaatcaacctgtttttgaattaaaaaatattgattattattttgataataaacaagtattagaaaacattaatattcgaattaataaaggtgactttcttgcaattgttggtcctaatggagccggtaaatctactcttttaaaggttattcttggcttgttaccattacaacacggtgaaatatacattgacgggaaatattataaaaaaaatactcaatctgcattaaaaattagttatgtatctcaaaaagccaatgcttttactgcaggatttcctgctagtgtgaaagaagttgttttaagtggtttaactaaaacgaaaagaatttttcagtggtttaataaaagtgatgaacaacaagtagataatgttttacatcgtttaaacattcatcatctaaagaataaaaatattgcagaattatcaggtggacaacaacaacgtgtactaattgcacgcgctttaatttcaaatccatccgtcttagtattagacgaaccgacaaatgggattgatgcaaaacatgtgaatgaattctatgccaccttgcaacatttaaaagaagaaggtataacgattattttagttactcatgatataggcgttgtggtagacacagctacaaaagtcgcttgcttaaataaacatcttcatttccacggttctactgaagaatttaagtctcttgatgaagttgaaatttcaaaaatatatggtcatccaattaaatttgttgatcatcaacataatcgttcatgctgtgaagcataattttaaataggagttaattatgataagtatatggattgaattaagaggtgaatatcatgattgaagcattgttaaattttgattttatgagatattcacttttaagtgggatattgattggttttattgcacctttaattggtgcatttatagtggtaaggcgattatcattaattgctgatgctttaagtcacgtcacactaggtggtatttcgtttggaatgtttattattaccttatcaccagcattagcatttataaaccctatgtggtttggtataatctttgcaatagttggagctttacttatagaaaaattaagaacttcatattcaaactatcaagaaattgcaattccaattataatgagtgcaggaattgcattaagtgcaatttttatttctctagctgatgggttcaatcaagaaattgttgggttattattcggttcaattagtgctgtaaatttaagtgacttaatcacaattacgattatttcaatcgtcgtattattattcattcttttattatacaaagaattatttattttatcttttgatgaggaatatagtaaggttattaatattccaaaatggattcagtttttatttataacgattgttgctatggttatttctgcatcaatgagagtagtaggaattttactcgtgagtgcattaattactttacctgtggctatagcaatgcgattaactaaaggatttaaacagttgattatcttaagtattattataggtgaatgttctgttattctagggcttaccttagcattttatattaatatatctcctggtggtgtcatcgtggtattattagttctaattttaggaataacgatgttactacagaaaactaaacgaactgccaaaaaggagcattaaattatgaatacaaatgacgctattaaaattttaaaagacaatgggttaaaatatactaagaaaagagaagatatgattaatatctttgttaatgaagataaatatattaatgctaaatatatacaacaacaattagacaatgattatccaggtatatcttttgatactatttatcgtaatcttcatctttttaaagatttaaatattgttgaaagtacagaattagatggagaaatgaaatttagaatcgcttgtactaatcatcatcatcatcattttatatgtgaaaattgtggggatacaaaagtaataaatttttgtccaattgagcaagttaagcaattcctacctaatgtagatattcatactcataaattagaggtatatggtatatgtgaaacttgccataataaaggtataaattaaaatgagaaatgttctgagacgtaagtaagcgtctcagttttttataggtcaaaagtctgaatttctactaatattgaaatatatgtttaaaaactactaaaatgagatataagaagagtataataagaaatgtgacaactatgtgaataatatttagagcaaatgatttgttgcacatcacatagcttgttattatttatgtaaagataatttaggaggatgattatttatggcttttgaattaccaaatttaccatatgcagcagatgcattagaaccacatatcgacaaagaaacaatggaaattcatcatgacaaacatcataacacttatgttacaaaattaaattctgcagttgaaggtactgatttagaatctaaatcaattgaagaaattgttgcaaatttagatagtgtacctgaaaatattcaaacagcagtacgtaataatggtggaggtcatttaaatcactcattattctgggaattattaactcctaattctgaagaaaaaggtactgtaattgataaaattaaagaacaatggggttctttagatgagtttaaaaaagaattcgctgataaagctgcagcacgttttggttcaggttgggcttggttagtagtaaataatggaaaattagaaattgttactactccaaatcaagataaccctattactgagggaaaaactccaattttaggcttagatgtttgggaacatgcttattaccttaaatatcaaaataaacgtcctgattatatcagtgctttctggaatgttgtaaattgggaaaaagtagacgagttatacaatgctgctacaaaataataaaaaaaaagtatttattagtggtctctttttgggagatcacttttttttatgaaaaatatagaaaaattatacaatttcatatatcatttatacgtatacatgattaataattgaggtcggttgtcttgcttaaaagattaaaagaaaaatcaaatgatgaaaaaataaaacatacgatgaataaacgaattagttttatatttggtgcaattgttttgattttcgtattaattgtcctaagactaggatatttacaaattgcacaaggtgcacattatagtcaattagtgaaaaatgatgagaatattactgtcaatgaatccgtaccacgaggaagaatactagatagaaatggcaaaattttagttgataatgcttcgaaattagcaattacctacactcgttctagaaaaaccagtcaacaagacatgttaaacaccgctaaaaaattagctaaactcattacaatgaatactgataagattacaaagcgagataaacaagacttttggatccaaaatcatccaaaagaagttaataaattaatgaaaaaagaaacaactatgcttaacaatggtagcataagtcaagaacagtacgataaacaattacatagtaaaattacagaaactcaattaaatagtttatctaagcatgatttacaagtattagctatatacagagaaatgtcagctggatctacacttgatccgcaaatgataaaaaatgaagatgttagtgaaaaggaatatgctgctgtttctcaacaattggataatttacctggtgtcaatacttcaatggattgggatcgaaaatatccatacggtgaaactttaagaagtatatttggtagtgtctctacaccttctgagggtattcctaaagaattaactgaacagtatttagcaaaaggatattctagaaatgacagggttgggaaagcttatctagaatatcaatatgaagacattctacgtggtaaaaagaaacagttgaaatacactactgataaatctggtaaagttattagttctaaagtgattaaccctgggtcacgcggaaatgatttacaactaaccattgatattgatttacagaaaaaagttgagtctctattagaaaatgaaataaaaacactacgtagtcaaggagcaacaaatatggacaatgctcttgtagttgttcaaaatcctaaaaatggtgatattcttgcaatggctggaagacaaattgataaaaagggtgaactgctagattatgatttaggtaattttactggccaatttgcagtcggttcttctgttaaaggagcaaccttattaactggttatcaaaatcatactatcaaagtcggtgaagaaatgattgatgaacctttacactttagtggcggactaactaaacgttcttactttaaccaaaatggcaaagtcctaattaacgacaaagaagcattaatgcattcttcaaacgtatatatgtttaaaactgctttaagactagctggtgatccttactcaagtggtatgaatttacctaataatattgaagaagctggtcaaaaactgagaaaaggtctaaatcaagtaggattaggtgttaaaacaggtatcgatttaccaaatgaaacaattggtcaaattgaaccattaactaataatccaggcaattatttagatttatcaataggtcaatatgatacttatacacctattcaactttcacaatatatatctacaattgcaaataatggttacagagtacaaccacacattggtttagctatacatgacgcaacaaatagtgatcaggtaggacctgtaaaagataaaattaaaggtaatatactaaataaagtcaataattctcaagatgagatagatgaagtaaaacaaggattcaagatggctttcaatgaaaaagatggtacaggctatgcaagcttccataaaactgttgttccatcagctggtaaaactggtactgctgaagtttatcaaaatggacaacctagagttaactcaacatatataggttatgcgcctgttaaagatcctaaattagctttttctatcgtatatactaatcaacctgttccaccaccatggttaaatgggggagatttaggaagagatatcattaattactactttaaaaatgaaaaataatttgaataaccgttgataagatgcttttctatttaacactagtaaaaattaatacttttcaattaatcgtctaagtggtatgataataaagtcgtatttagaaaaggtaaggaggtataatcatgcgcgtaaacgtaacattagcttgtactgaatgtggtgacagaaactacattactactaaaaataaaagaaacaatcctgaacgtattgaaatgaaaaaatattgttcacgtgataacaaacaaactctacatcgtgaaactaaataatattaaaagtaaaaaggttggaacaaaattgttccaaccttttttactttagtagctcattcaactattaataatcctaaatatataatcaacaactatatttattttatataaattaatataattttttaacttaaaataatttgaattatcacaaatgacatcactatataataacgttataatatatattaaaggatgggagaaagaatgggtaaaaaacaaattagaaaaaatatcttatcacaaatgaaagactttgataaaaaaagtaagcataaagctgatatttggttaatgaaacaattaattgaaaacgaaaaattcaaaaatgcacatcgtatcggtatatttttgtctatgccacacgagattaatacatacaatattattaatttcgctttagataatggaaaacaaatttttgtgcccaataccgattacagaagtcgtaatatgaactttaaacaactattagatttgtcatcaatagctaccgatgataaaggcattaattatgttaatgaagatacgtctattagtaatgacatggatttacttattgtacctggagtagcttttcaaacaaatggttttcgtatagggtacggaggaggttactatgataaatttctaaatcaacacgatattaactcaattagtcttatatatgacttccaaatatcagatttcgatgtggaaaaacatgatcaacctgtagataatttaattatatgtaacactaaatttgggaggaattaatgaatattgataaactatattggaaatcaatttattattggatcaaatattttaactataaattagaacacacagataaaaatacaaatgaaatttggttatccaataagaaaaaagaagaacttattgtatttagaaaagaagtgagttcaactcaagagatacgcttcgacaaatctaaaataaatgatcataaagagaatttacaaaaaaagttaggatttaaaattaaaaaagttgagttcttctactttttagaaacatcgatgaatattgataatttcgatgaaatgcatcctactaagttgatttatcatagtatcactaatgaaaaagacttagaaaatacaatgcctaattttattttaaaaaaacgcgttaataaaaaagataaaaaatcatcgttagattataaaaagcgtgtacttaatacgaaccttgttgataagtatatgatgatattttcaccaatgacttatacacttatagctataaatgtcctagtatggttatatatgaagatttatctaaatcatttttcagatattaagctactagatgttgggggattagtacacttcaatgtagtgcacggagagtggtaccgtcttattacctcgatgtttttacattttaattttgaacatattttaatgaatatgctatctttattcatttttggtaaaattgtagagacgatcgttggtccatataaaatgttaggtatctatttaatttctggattatttggaaactttgcttcgttatcctttaatataagtacaatatctgttggtgcaagtggagccatttttggtcttataggggctattttaacgatgatgtacttaagtaagacttttaataagaaaatgataatacaattgttagttgttgtattaatattgatttttgtctcgctatttatgtcgaatattaatttaatggctcatttaggtggtttcataggtggtatccttattacattaataggctattattttcatgaaaatcgtaatttattttggttatttttaattttattattagtactttttgttttattacaaattagaatattttcaattaaagaagaaaatatttacgataaacttattaaagacgaaatgatatcctataattatgatgatgctttatcaattgttgaacatacaatcaataaaggatacgatgatgatgaaacatattacttaaaaggtttaataactgctactaaaagttctaaagcagaggcaatggctgattgggaaagaggcctaagaagtcatcctaactctgcattattaaactatgaattatccatagctaatagagcattaaatgataacgataaatctttaaaatatataaaaaaagctttgaaaattgatgccaataaccaaagctataaaaatttagaaaaagaattgaaagatagtaatgaatcgaaaaattaacaatttttatgatgtcttgcaacttttgaaacgttatggttttattatatattttaaagataaagaagatatgtatgaaatgatgcaacaagaaatacgttctctttacaattatgatcttttaacaaatgaagaatatctaaaatgtattttaataattaatcaaagaaggaatgagcataaatgaaaaatattattttagcagctgatataggtggaacaacatgtaaacttggtatctttgatacaaaattagaacgattacataaatggtctattgaaaccgatacttcagaccatacaggtcgaactttattaaggcaagtctttgattcttttaaagaagcaactgaatcttatcattttgatcttcaaaatgttatcggagttggtataggagttcctggtcctgttgattttgaaacgggaatcgtacatggggctgttaatttacattggcctggaaatgtaaatgtgagagagatttttagtgaatttatagattgtcctgtatatgtggataatgatgcaaatgtagctgcactgggtgaaaagcataaaggtgctggtcaaggtgcaaatgatgtagttgctattacacttggtactggtcttggtggaggcatcatttcaaatggtgaaattgtacatggtcataatggttcaggtgcagaaataggtcatattagaactgattttgatcaacgttttaattgtaattgtggcaaatcaggatgtattgaaactgttgcttcagctactggagtggttaatttagtcaatttttattatcctaaactaacttttaaatcatctattttatcacttataaaagagaataaagtaactgctaaagctgtatttgatgcagcaaaagcaggagatcaattctgtatatttataacagagaaggtcgcaaatcatatcgcttatttatgtagtataattagtgctacaagcaatcctaaatatattgttttaggtggaggaatgtctacagctggattaatattaattgaaaatattaaaacagaatatcataatttaacatttactcctgctcaaaaagatactgaaattgtccaagcaaaacttggaaatgatgctggtatcactggtgctgctggactaataaaaacatatataattgaaaaggatggtgttaaataatggctattattgatgtagttgttataccagtcggaacggaaggtcctagtgttagtaaatatattgcagaaatccaaacgaaactagaagcatttaaaaagcaaggtaaaattgactatcaattaacccctatgaatacgcttatcgaaggtgatcttaaagatttatttgaagtagttcaagcaattcacgaattaccatttgataaaggattagatagagtatgtacaaatatccgtattgatgatagaagagataagtctcgtaaaatgaatgataaattaaaatctgttcaaaaacatttagataaacaaggtgaataatatgagaatttctaatttatctttaggattagttgatacaaacgcgtattttgtagaaagcgataacagtgtattattagttgatcctgctggagaatctgataaaatatttaagaaattaaatcaaatcaataaacctttaaaagcaatactacttacacacgctcattttgatcatattggtgctttagacgatgtattatccaaatatgatgtacctgtttatatgcataaagaagaattttctttcttaactgatcctgaaaaaaatggttcttcaaaatttaaacaatatggtatgccactcactactagtaaagctcaaccaattgctttagatgaaggtaattttacaatcgatgaatttaaattcaatgttcttcatacaccaggtcattcgccaggaagtttaacttacgtttttgacgattttgcagtagtaggagatacattatttaataacggtattggaagaacagacttatatagaggagactataaaacattagtagactcaattaaggataaattatttgaattagacggagatttgcctttattcccaggtcatggtcaatacactacggtagatgacgaacaactcaatccatatttagatggacaataaaaaagtaatttaaacacctcttacgtttatatatgtaggaggtgtttttttgaaattattatttcaagaaataattaataaagcaatttcaaaaaatgcaagtgacgtacactttattccttcagaggataaagtacatattaaattcagagtgaatgatatattagagacatatgaaatgtttagtaatgacatttatgaaaaattattaatttatatgaaatttaaagcaaatttagatgtatcaacacatcaaatagctcaaagtggtagatatacttatcatgctaaatcaatattttatttaagaatttctactttacctttgtcattaggaatagaaagttgtgttattagacttatccctcaatatttcacttctaaaagagagtataaggactttaatgactttaaatctctaatgaataaaaagcaaggtctcattttacttactggtccaacaggttcaggtaaaagtactttgatgtatcaattagtactctatgcttttcaagaattaaatttaaatgttattacaattgaaaatcctgttgaacaattattaaaaggcataacacaagtgtcagtaaatcataaagccggtatagattatgttagttcatttaaagcaatattaagatgtgatccagatgttattttaattggtgaaattagagatgctgaagtggcaaaatgtgttattcaagcaagtttaagtggtcatttagtgttaactactatgcattcaagcaattgtaagggcgcaatactcagattgttagagatggggattagtgttcaagaaatttcacaagcaataaatgttatttcaaatcaaagattagttacaactacttcaaatcaaagaaagcttgtttgtgagtctattacaaataatcaaattcaatatttttttgaacataaccatacgcttcctaagacatttaataatttaaaagaaaaattgttatcgctatcgaaagaaggtcttatatgtgaagatgtggttgaaaaatatatttaacaaacattctaaagttcttaatgaaaaccaacaaattatacttctaaataatttgaataacttacttaaaagtggatttacattattagaaagttttaattttataaatttgtattttaattataaaaataaagatatagcaaataagatagttaaaataataaaaacaggaggagaatgcgatcaaatattagaattaataggctatcctaaatctattatcactcaaattcaatttgcgcagaaatatgggaatataaatgaagcactagaggaagcaatgaattatttaaaaacaaatcttcaagctaaacaacgaatattaaaagctattcaatatcccatcattttaattgcaatatttataactatgttaagtatattaaattatacagttttacctcaatttgaacatctgtattcaatgatggatgttaaactcaatttatcacaaactattattacatatttaattagtcatttaccgcaaatttttctttttgttttttttactttactaactttatccatcattatatttatctttcttaataaattagatatatccaaaaaacttacattcatttcttacataccaattgtacgtttttattattcgactataaaaacatatcaacttgctaatgatttagctttattttataaaaatggtattagtattcaacaagtcgtagatatttacattcatctacaaaacaactcatttttgaattatattggtatcgttattcaaaatgaactaaatagaggcattaatttacccaatattttgattaaaataccatgttatcaatatgatttaatacagtttattaagcaaggtgagaaaaataataaattagatattgagttgaaaatgtattgtcaaatattaattcaaaggctccaacaaacagctttaaaacagtcaaaaattatccaacctatcgtatttatattcttaggagcctttatagtcagcttgtatctagtgattatgttacccatgttccaacttatgcaaaatattaagtaaagtaaaatggaggttttttatgaaaaaattcaaaaataaattaaaagcttttactttaattgagatgttacttgtactattaataattagtgttttactcattcttattattccgaatatagctaaacaaatgtcacatattcaatcaacaggatgtgaagcacaagtgaaaatggtcaatagtcaaattgaagcttatactttaaaacataatagagttcctaattctattgaggacttagtaactgaagggtttataaaacaagggcaatcatcttgtaagtctggagaaactatcagtattaaaaatggagaagcagttgcagagtaagaatattaaagcattcacttttatagagagcttgttaatcattttgattttaacaatcttacttaatgcaactttaagggtaaatgtatttaacaatatttctttgtcagacgatttaaaagcaacacaatttgttaatcaattagaatattttaaatctaaagcgatgcgtgatcatcaatctattacattgttaatttcaaaacattcctcaattataaaagtaatagaagcacatggtgggcggtacaactacaatattgaagatggaaaaatagttgaagttagaaatttagagaaaattacttttaataaagaaggaagaataaatcagtttggctctttaatattgaaaatcaatcaacatcaatataagttgattattaatattgaaaaaggaagaattagatattttaaaatttaaagcagtgttactcatcgatagtttatttagcttgtatatattcactactatagtttttactttaattccactactaatcagtttaaatcatacattaaaaagagaataccaaattattgaaatcaagcaaaccataatgagtagtatcaaccattatgataaaaaaaacctttcaaaaggtataaatttaggtgattatcatattaaactttattccaacaaaatatgtggacttcacaaagaaactgaaatcgaatcatgcgttaaatattaaattaaaatcattcactttaatagaaatgttagtttcattatttttaacaacaatgatgttaacattttttcctcaattaattaaattgactcattcctatttatacgagtcatataatagttatcaaacagaatatgctttttttcagacaaatataactcaaattatttcgaaaaagcatcatgcccttataattaaggataaacatacaattatcattgataatgaatcgtctaaagattatatagaatttaaaaacaacaaactattttacaaaattaatgggaatggcaatatcgttttactaaataacgtcatcaatgcagaatttcaaattttaccttctaacatcataaaattaaaactaaaaataggtgataaaaacgactactatgaaaaaaacttatttttataaaatgaaaggatatataagtagctatacattatttatttttagtatatatttgataattatatctacttattctgctcaatatagtataaaattaaaaacaatacataatattcaaatatattatgatagtataataagtgataaacttaagagaggtgattaggatgactcactcttatttaccacttatattaacaggctttatgggtactggtaaaagtactattggcaaatatttggcttcaaaattacactattcatatattgatttagatacatatatagaaatgaaagaatttaaaacaataccagatatttttaatgaaattggtgaaaaaggatttcgtaagttagagtataaatatttaaatgattgtattggtaaatatgatattatatcaaccgggggaggaattatagaaaacgataattctatctcacttttaaaaaataaaacagttatttggttagattgtgatatagatattatctataatagaattgctaatgatccacatagaccaaatgcgaaaaacaaaagtgaaaaacaattaaaagacttgtatttatcgagagtttcaagatataatgaaatcgcatccacaaaagtagatagtagtaaaacaattgaatgtgtatataaaacaattttaaatcatataccatgcgaatgatcagtattagagagaataacttgaactgattctatagttgttttgaaattatgtcatgttatcgccgaaggtgcaagtaaactacgaaactctcaggcaaaaggataatactgttacgcagtcctggatttgttatttagacagggtagcttctgctactctgctttttttataaaaaaatagggggtttttaaatgacaaacgaattaaaaaagacaccattatatgaaacttatgtaaatagtggtgctaaaatagttgaattcggtgggtgggctatgcctgttcaatttactagtattaaagaagaacataacgcagttagatacaaagtaggtatgttcgatgtaagtcatatgggagaaattttaatagaaggtgaaaatgctagtaaatttgttcaatatttactttcaaatgatactactaaattatctgaaactaaagctcaatatacagctttatgtaatgatgagggtggtatcattgatgatttagtaacatataaaattgctgataacaaatacttattaattgttaatgcagccaatactgataaggatttcgaatggattcaaaaacatcaatctaaatttaatgctactgtaacaaatgtgtctgaacagtatggtcaattagcggttcaaggccctcaagcaagaactttagtaagtgaacttgttgatattgatgtaagtgaaatgaagccttttgaattcaaacaaaatgtaactatttttggaaaaaatgttatcttatctcaatctggatatacaggtgaagatggttttgaaatttattgtaattcaaatgatacagttgacatttggaatggttttattgataaaggcgttgtaccttgtggtttaggtgcaagagatacacttagattagaagctggtttacctcttcatggacaagatctcactgaatcaattacgccttatgaaggtggaattgcttttgctgctaaacctttaattgaagatgaatttattggtaaatctgttttaaaagatcaaaaagagaatgggtcaaaacgacgtactgtaggtttagaacttatagataaaggcattgcaagaacgggttatacagtaatgaatcttgacggaaaagaaataggtgaaattacttcaggaactcaatcaccttcttcaggaaaatcaattgctatggctattattgatcgtgatgaatttgagttaggtaaagaattactagttcaagttcgtaaaagacaattaaaagctaaaattgttaagaaaaatcaaatcgaaaaataactaaggggtgtgcaatgtgagtcatcgttatataccattaactgataaagataaaaaagaaatgttagaaacaattggagcaaattcaattaccgagctctttggagatattccaaaagatattttacttaatagagatttgaatatagatagtgcagaagctgaaacttcacttttaagaagattgaatactattgcaaataaaaatattactaaagaaacacatgtgagttttttaggtgcaggagtatatgatcattacacacctgcagtagtagacgctatgatttctcgttctgaattttatactgcttatacaccttatcaacctgaaatttctcaaggtgaactacaagcaatttttgaattccaaacattaatttgtgaacttactcaaatggatgtcgcaaattcgtctatgtatgatggcataactagctttgccgaagcttgtatattagcttttaatcatactaaaaagaacaaaattgtagtatctaaaggtctccattatcaggctctacaagtattaaaaacgtatattaaagtaagaaaagaatttgaaattgttgaagttgatttaaatggaacgattactgacctagaaaaattagaacaagcaattgatgatgatactgcagcagttgctgtacaatatcctaacttctatggatcaattgaagatttagaaaaaattcattcttatattgaaaataaaaaagcgttattcattgtttattctaacccattagcattaggcgttttaacacctccaggccaatttggagcagatattgttgttggtgatacacaaccatttggtattcctactcaatttggcggtcctcattgtggttactttgctactactaaaaagttaatgcgtaaagttcctggcagattagtaggacaaacgcaagatgatgaaggtaatagagggtttgttcttactttacaagctcgtgaacaacatattcgtcgtgataaagccacatcaaatatttgttcaaatcaagcattgaatgctttagcatcctcaattgctatgtcagctcttggtaaacaaggtatttatgatattgcggttcaaaacttagaacatgctaattatgctaaaaatcaatttaaaaacaacggttttgaagtcctagatggtacatcttttaatgaatttgttgttaagtttaatcaacctatcaaagatgtaaataaaaaattagcagaacatggtttcatcggaggctttgacttaggtgaagcttcatcagactttgacaatcatatgttaattgctgttactgaattaagaacgaaagaagagattgatacatttgttgagaaagctggtgagctaaatggtagtaagtaaatctagtccattaatttttgaaagatctagagaaggtagatatgcatattctttaccacaaagtgatattaaaacagactctgttgagagtattttagatgataaatttattcgtaaaaataaagcagagtttcctgaggtggcagaattagatttagtacgtcattacacggaactttcgaataaaaactttggggtagattctggattttatcccttaggttcttgtactatgaaatataatccaaaaatcaacgaaaaagttgctcgtatttctggatttgcagaatctcatccactacaagaggaagaacaaattcaaggttcattagaaattatttatagtttacaagaagaactgaaagaaattacaggtatggatgaagtaactctacaaccagcagcaggtgctcatggtgagtggacagctttaatgatttttaaagcatatcatataaaaaatggtgagggccatcgtaatgaagttattgttccagactctgcacatggtacaaaccctgcatcagcttcatttgccggatttaaatcagtaactgttaaatctaatgaacgcggtgaagttgatatcgaagacttaaagcgtgtcgttaatgaaaataccgctgctattatgttaactaacccaaatactttaggtatctttgagaaaaatattatggacattcgtgaaattgttcatgaagcaggcgggttactctattacgatggagcaaacttaaatgctattatggataaagttcgtcctggagatatgggatttgatgctgtgcacctaaacttgcataaaacattcacaggtcctcatggcggtggtggccctggttcaggtccagtcggcgtaaaaaaagaattagcaagttatttaccaaaaccaatggtgattaaagacggtgatacatttaaatatgataatgatattgaaaattcaatcggtcgagtaaaaccattttatggtaactttggtatttatttaagagcttatacgtatattagaacgatgggtgcacaaggattaaaagaagtgtctgaagcagctgtcttaaatgcgaactacattaaagctcgattaaaagatcgttatgaaatcccttatgaacaatattgtaaacatgaatttgtcttaagtggatctaaacaaaaagaatatggtgtccgtactctagatatggcaaaacgtttactagactttggcgtacatccaccaacaatttacttcccgctaaatgtggaagaaggtatgatgattgaaccaaccgaaactgaatctaaagaaactttagactacttcattgatgcaatgcttcaaattgcagatgaagttgaaagtgatcctgataaagtattagaagcacctcatacaactatcattgatagattggatgaaacaactgcagctcgtaaaccaattcttaaatttgaagatttacatcaagaaaaactttaatattgtaaataatttaatgaatgatttaattatcagaaataataaaactctcaagaaatttcttgagagttttatttctgataattattttttagttttaattttaccagtccattttttatagccgcctttaagcatgtataaatctttatatccattttttttcaaaatgcgagcagcacgataactggcaataccatttgcatcacaaagatatacaggttgatctttacgtaaaccttgaaatctttgtctaaacatagatattggaatattgcgagcaccattaatatgaccataatcataatcaactttttcacgtacatcaatgacttgagcttttcttaaacctttatgaaattcgttttgatctagttcagttacagctcgtcgattaagaaagaaatttccaaccatgtaaaggattattaaaactataattattaatgctataatcaaagatacattcatattgcatcctccctaattaaccgttattattaattataaaggtgttagctcaatttatcaaaaattttttattgtttcatatttctaatacattctaaagtaacattaacgttgaatttatataaattaagttgtgattggagtttttatatgactgaaacatggaattttatcaatactgggagccatgatccttattataatatggcaatggatgaagccttattaaattttgtttcaagaggggaaattgatcctgtagttagattttatacttggaatcctgctaccttatctgtaggttattttcaaagattaaaaaaagaaattgatatcgataaagtgaaagaaaaaggatttggtttagttcgccgtcaaactggtggtagaggcgttctacatgacaaagaattaacatatagtgttatcgtacctgaatctcatccaaatatgccttctacaattactgaagcctaccgtgtcatttcagaaggacttttagaaggctttaaattattaggatttgatgcttattttgctattccacgttctaaagaagagagagaaaaattaaaacaaccaagaagtgccgtttgctttgatgccccaagttggtatgaattggtcgttgaaggacgtaaaattgcaggtagtgcacaaacacgtcaaaagggtgttattcttcaacatgggtcactacttcaagatgtagatgtagacgaattatttgatatgtttatttttaagaatgatcgcttgaaagaaaaaatgaaaaaagcttttgtagataaagctgtagcaataaatgatatatcagatagacacatctctattgaagaaatggaaaaagcatttgaagaaggatttaaaaaaggtttaaatatcgaatttaaaccactatctctaactgaaaatcaattagccgaagtaaaagttcttgaagaaaaatatcgttcagaagagtggttatataaaaaatagatataaaacaaggaggcttaagagtactaatactcttgaacctccttgtttttattttctttgtctttttttatattttcggactgctcttcgatattttctctgatcttctgtaaggaagaagaaataatagataaagtaaataataagagcaatcattataagtgtgaaaattgttttcatgaacgacattacaaaaatatttagatttagcagtaaacctatagctgctataattaaaacgaaataaaatataatatttttcaactaaaaaactcctattttatgaactactagaaacattaatttgtgataacttcatcttaccttgatttattttctttttattgttagattcatagccatttttaatatctttaaaagcagattgaagatttttgtttatttgtttaatagttttatcttcgttagtattatcatttgatatattacttttatctgtatcacttttatatttgctgtaggcatcatctatatcatttgataatgaatttagcttttcaagattttgatttttatcatcttttttagttttatttaaatcaagttgattaaatttatcgataatcttagcaatatcttgataataatttgaagaagcttgtaaaaaattagcttcattattattatcaacagttttagatacattctttttatctttatttaatgcttctaactgagatttttgattatttatatcttgatttagttgttgaatttttaattttaaattatgattctcatctcttaaattggttgttttatcttctaaaggtcctaaattttgagagccacagccaaccaaaaacaaagaagctcctaaaatcgttaataatcttttcatgtaaatctccctaaatcaaaatatctttaatattttaagtatgttattattttaatgtatataataaaaatgtacaaacgttatacaaggagtgggttaaatggataaattagctaaagttcgtcatatattaaaaagtgaaaatcttgatgctcttgttatattatctgactataatagacgttatatttctgatttcactggaacaagtggcgctttaatcatttctaataatgaaaataagttgattacagatttccgttatattgaacaagccacaaatcaagccactcactttgaaattgtaaatcgacgtagtgggattattgatgagataaaagaaattataaaaaacaagcagtataaaacagtaggttttgaaggtcatttagttagctatgatacgtttcaagaattaagccaaattgatacgaagtacgtaagtataggcaatgccattgaaaaaattagagaaattaaatcacctgaagaaatcgctaaaataaaatatgcggctaagatcgtggatgatacttataactacattttaaatattgcaaaagttggaatgactgaaagagagttaaaagcattgcttgaaagtaaaatgttagaactaggcgctgatggtccatcatttgatacaatcgttgcttctggttatagaggggctttgcctcatggagttgctagtgataaagtaatcgaaaaaggtgacatgattactcttgactttggtgcatattatagaggatactgttcagatattactagaacatttgcgattggtgaacctgataaaaaattgaaagaaatctataatatcgtgcttcaatctcaaataaaggcaattgaagaaatcaagccaggtatgacaactaaggaagttgatgcattatctagagattatattaaagcacatggttatggtaatgaatttggtcattctttaggtcatggtattggtttggatattcatgaaggtccagtattatctaaaaatactaatgatacagttcaagttaataattgtgttactattgaaccaggtatttatgtagatggtcttggtggagtgcgtatagaagatgacattttaattactgaaaatgggtgtgaagtctttactaaatgcacaaaagaccttattattttatagtaagcgtataattgaggaggaaactgaatgatttcggttaatgattttaaaacaggtttaactatttcagtagataatggaatttggaaagtaattgatttccaacacgtaaaaccaggtaaaggttctgcttttgttcgttctaaattacgtaatttaagaacaggcgctattcaagaaaaaactttccgagctggtgaaaaagtagaacaagcgatgattgaaaatcgtcgtatgcaatatttatatgctgatggagatactcatgtcttcatggataatgaaacatttgatcaaacagaattatctggcgattacttaaaagatgaattaaaatatttaaaagcgaatatggaagttcaaattcagtcatatgaaggtgaaacgattggtattgaattaccaaaaactgttgaacttgaagttactgaaacagagccaggtattaaaggtgatactgcaactggtgctacaaaatctgctacagttgaaaccggttatactttaaatgtaccattattcgttaacgaaggcgatgtgttagttattaatacaagcgatggtagttacatttcaagagcataattaacaattttaaaaatttaaattaaaacaggttaatgcatatttaattatggattaacctgtttttatataaataatgaaaaagaataatcaatattttagtatctaagttttaatataaatttactatattataattacttatatacttttttaatcataagttagatctcagttaaatgaacacgcttgaattgattttcacactcaagtaaaatagatgggtagatgaaaactaagtcgaggagtcattaaattatgaactttaaagaaattaaagaattaattcaaattcttgatgaatcaagtttaactgaaattaatatagaagataataaaggtagcgtagttaatttaaaaaaacaaaaagaaactgaaattattacgcctcaatattcacaacaaccaacagtgatggcatctcaaccatctgtacaaacaccaatggcaaatgaaatgtctcaaactagtgaagtaaaccaagaaaatgaaatgtcaaactacgaaacaattaatgccccgatggtagggactttttataaatctccatcacctgaagaggaagcttatgtacaagttggggataaagtcactaatgattcaactgtatgtatcttagaagccatgaaattatttaatgaaattcaagcagaagtcacaggagaaatcgttgaaattttagtggaagacggacaaatggtagagtatggccagccgttatttaaggtgaaataatgaaaaaagtattaatcgcaaatcgtggtgagattgcagttagaattattagagcttgtcatgatttaggtattcaaactgttgctatatattctgagggagataaagatgcattacatactcaaatcgctgatgaagcatattgtgtcggtccaactcagtctaaagattcatatttaaatattccaaacatcctatctatagcgacttcaacaggatgtgatgcaattcatccaggttatggctttttagccgaaaatggtgatttcgctgaactttgtgaagcttgccaattaaaatttattggaccaagttatcaatccattcaaaaaatgggtattaaagatgtagctaaagctgaaatgatagcagctaacgtgcctgtagtaccaggaagtgatggattaattgattcgattgaagatgctaaaaaagtggctaaacagataggatatccagttattattaaagctactgctggtggcggaggtaaaggaattcgcgttgcacgaaatgagaacgatttagaaaatggttaccgtatgacacaacaagaagcgcaaacagctttcggtaatggtggattatacttagaaaaattcattgaaaatttccgtcatattgaaattcaagtgattggtgatcaattcggtaatgtaattcatttaggcgaacgtgactgcacaattcaaagacgtatgcaaaaattagtagaagagtcaccttcgccaatacttacagatgaaaaacgtaaagagatgggtaaagccgctattcgcgcagctaaagcagtgaattatgaaaatgctggtactatagaattcatatatgatttaaatgaaaataaattctattttatggaaatgaatacacgaattcaagtagaacatccagttactgaaatggtaaccggtgtagacttagtgaaattgcaattaaaagttgctatgggagaaccgctaccttataagcaagataatattacaataaatggccatgccattgaatatagaattaatgctgaaaatccttataaaaattttatgccttcaccaggtaaaattacacaataccttgcgccaggaggatacggagtaagaatcgaatcagcatgttatacaaactatacgattccaccttattatgactcaatggtagcaaaattgattgtgcatgaacctaccagagatgaagcaataatgactgggattcgagcactaagtgaatatttaattctaggaatagatacaacaattccattccatcttaaattaatgaataatgatatttttaaatctggagattataatacaaactttttagaaaagtataatattatggctgagagtgaataggaggataaaacaatggtaaatgtagcagattattcacatgctaatttaggtaaagtagaaattgtaccagaagttatttcagtaatagcaagtattgctgtttctgaagttgaaggagtgactgggcatttttatgaactaagaaagagtaatattgaaaaaataagtcgtaaaaatttaaataaaaatttaaaagttaatactaaagatgatggtattcatattgatgtttattgctctattaaacatggaataaaaattgctaaagttgcaagtaaaattcagacttctatttttaattccattaaaacaatgactgctatcgaacccaaagaaattaacattcatatcatgcacattacagctgaataaatcaaagttaccataatacaaaggagtttcttatgagtcgtaaagaatcaagaaaacaagcatttcagacattgtttcaactagaaatgaaaaatacagatttaacaatcaatgaagctataaattttataaaagacgattatccagacttagattttgagttcattcattggcttgttacaggagtgaaagatcatgaacaagttttagatcaaacaattgaaccaaaattaaaagactggtctatacaacgattattaaaaacggatcgtattattttaagaatggctacctttgaattgcttcatagtgatacgccccctaaagtcatcattaatgaagcagtagagctaacaaaacaatttagtgatgaaggtcattataaatttataaacggtgtcttaagtaatataaaataaacatatttgagtgatgaatcatgtcagaatatttaagtgtctctactttaactaaatatattaaatataaatttgatcaagatccacacttacaatctatcctcttaaaaggtgaactctcaaactttaaaaaacattctagtggtcatctttattttaatgtgaaagataaaaatagtgtgataagtgctatgatgtttaagggaaatgcttctaaactaacatttgatcctaaagaaggagacgaagttttattagaagctcgagtttcagtttatgaacgtagaggaaattatcaaatttatgttaataaaatggaaattgatggtataggaaatttataccaaaagctagagcaattaaaagaaaaactaaataagcagggaatttttaatcaaaatcataaaaaagcaatccctagatttcctaaaaaaattgctattcttacagctgatactggagcagcaatcagagatattcacactaccatagatagtagataccctctagtagaaaaaatatcaattagtacattagtgcaaggtattaatgctaaaaatgacattattgaaaaaattaagtatgcagatactttaggagtagataccatcattttaggccgtggaggcggctctattgaagatttatggaatttcaatgaagaagaagttgttcgagctatatatgagtgtcatacaccaattatctcagctgtaggacatgaaactgattttactcttagtgattttgtagcagatatgagagcagcaacacctactcaagctgctgttatcgctacaccagatcagtacgaactcattcaacaaatacatcagtatcgattttctcttactaaaagtattaaacaactagtagaaaaacaacataaacaattagattatttgtcatcgtattataaatttaagcaacctacattattatatgatcaacagattcaacgaagagacgatttagagaaaaaactaacacaacgtttaacgttaaatattgaaaaaaatagaaacaatatcactgtattgcgtcaacattttaatataagaagattaaatgatttaattgtacaatatcaaaaaatgagccgtaataatgaaaatagattaataaatttaacatataacttaattaatcataataaagctaatttaaaaaataaaattgagcaattaaatcaacttagtccaactaatacaatgttaagaggatattcaattgttaataaggataataaagtcattacaagcacacacgatttaaatgaacaagatgaaatcacattatcaatgaaagacggtaatatagatgctatagttaagaaagtaaggtgtgaagatgagtaaagaacaacaaagttttgaagaaatgatgaaagaattagaaagtatagttcaaaagttagataatgaaactgtttcattagaagaatctcttgatttatatcaacgtggtatgaaattatcatctgcttgtgacaaaactttgaaagatgctgaaaataaagtaaatcaattaatcaaagaagaaacaaaggatgaagatgatgttgaagaaatcaatgaatgaattgattgaaattataaataataatcttgacggtattataaaatcgtctccattaaatactaaactagaggaaagtatgcaatattcacttgatgctggtggtaaaagaattcgtccagtgcttgtattactcactttagaagtgttaaatgaaaattataaaaaagggttacaaaccgcactggcattagaaatgattcatacttattcacttatacatgatgatttgcctgcaatggacaatgatgattttagaagaggaaaattaacaaatcataaagtgtacggagaatggaaagcgattttagcgggagatgccttactaacaaaagcatttgaactaattgcaaatgataaaaacttagaagctgaaacaaaagtaaaagttatttcaagactagcacatgatagtggcaatctcggcatggtcggtggccaaaccttagatatggatagtgagaatactccaatagaattacatactctagagcaaattcataaggcaaaaactggagctcttttaaaattttctattttaagtgctgcggatattgccaatgtaaatgatgaaactttaaatacattagattgtttcagtgaacacttaggcctaatgtttcaaataaaagatgatttattagatgtttatggtgacgagaaaaaattgggtaaaaaagtgggaagcgatgtagaaaaccataaaagtacttatgtttctttacttggtaaatcaggcgctgaagaaaaactaaaatatcataaagatgctgcaatagatgcaattaatcaattgaaatcacaatatgatgttgaaccgcttctagaaattgtagatttattttattcacgtgaccattaatagttagagtttttctctttaaagattactaaaacaataatctttaaagagttttttgttttagtaatctacttttaatgatttataatgcataaatgtatataaatttaaatttaatttaaatagaaaatatgataatacgtatcataaataataatatctttcttcaaatcaacctttctaaaggataactttagtagtagttaaaataacgttgtgttaaaatcattgtataaatattcgaaactaggagtgttcataatggcaaaaaaatctgtaagacatataaaaataagagagattatttcaagtgaacaaattgaaacacaagatgaacttgtaaaacgtctaaatgaatacgacctaaatgttactcaagcgactgtctctcgtgacattaaagaattgcaattaattaaagtacctgcttcatcaggacaatatgtatacagcctccccaacgatagaaagtaccatcctttagaaaaattaggtagatacttaatggattcatttgtaaatattgaaggaacaggaaacctactcgtactaaaaacgcttcctggtaatgctcaatctatcggagcaatcttagatcaaattgattgggatgaagtattaggaactatttgtggtgatgatacctgtctattaatatgcagagatgaagaagcaagtcatacaattaaaacaagaattttcaatttattataaggatgcgattaatctatgttacaaaccttatcaataaagcaatttgcaattatagatgaactcgaaattcatttttctgatggtttaactgtgcttagtggtgaaactggatctggtaaatcaattattatagatgcaataggccaacttattggtatgcgtgcctcttctgattttgtaagacatggagagaaaaaagcaattatcgaagggatttttgatattgataatagtaaagaggccatttcagttttaaatgagttatatattgatattgatgaagactttctattagtaaaaagagagatttttagttcgggaaaaagtatttgtcgtattaataatcaaattgttacgcttcaagatctaagaaaagtgatgcaagaacttttagacatacacggccaacatgaaacgcaaacgttattaaaacaaaaatatcatttaaaattattagatgattatgctgaaaatcaatatagcagtgttaaagaacaatatgaaacgacatttaatgaatataaagaaaagaaaaaagaacttgaagaattacagtctgctgatcaagcattattgcaacgtcttgatttaatgaagtttcaatttgaggaattgcaagaagcttctctaaaagaaggtgaaattactcaattagaatctgatataaaacgaatccaaaattctgaaaaattaagtttagcattaaacaatgcgcatgtcacacttacagatgaacatgctatcaccgaccgtttatatgaattaagtaatcatttacaaactattgatgacattattccaggtagatttaaaaaacttaaagcagatattgatcagttctactataccttagaggatgctaaacacgaactatacgatgaaatgtcaaatactgaatttgatgaacaattacttaatgaattagaatctagaatgaacttactgaataatcttaaacgtaagtacggtaaaactattgatgaacttattacttatcaatctaaattagaaagtgaaatttctaagattgaaaattatgaagaaagtacttctcaattaaaagaagaaattgacttgctttatgaaaaagtaataaaatatggacagtcattatcgaaggaaagacgaattgtagctcgaacgttacgggatcatatcgtggctgaaattcaaaatttacaaatgaaagatgctaacctcgaaatttcatttcagcccttagaaactcctacaatagaaggaattgagtttgtagagtttctaattagtcctaataagggagaaccacttaaaagtttaaataaaatagcttctggcggagaactttctcgtattatgctagcgttaaaaagtatattcgttgaatcaagaggtcaaactgctattttgtttgatgaagttgattcgggggtttctggtcaagcagctcaaaaaatggctgaaaaaatgagagatattgcaaaatatattcaagttatctgtatatctcacttaccgcaagtagcttctatgagtgatcatcacttattaattagtaaaatgactaagaatgatcgtacaacaactcaagtgaaagagttaaaaaaagaagataaaattgacgaaattgctcgtatgatttctggagcaagtgtaactgaattaacaagagaaaatgctagagaaatgattgctcaaaatcataaatagtttataattgaataatttaaattaaggttggatgtcgaaaagaaatagaacatactgagtataatgttattttttatattcaaattgtttattcacacttttcaattctaacctttaaatctgattaataaggagtagcaaaatgtctgaaaaacaatatgacttagttgttttaggtggtgggacagcaggatacgtagcagcgattcgtgcttctcaattaggaaaaaaggtagcaattgtagagaaatctttattaggtggcacatgtttacataaagggtgtattcctactaaagcgctacttaaatctgctgaagtgactcgtactgttagacaatcttcagaatttggtatagacacaaacgatttacatattaattttgaaaaaatgatgaatcgaaaaacggatattgttaatcaaatgcataatggcgttcaaagtttaatgcaaaaaaatcatattgatatttataatggtataggacgtattatgggaacttctatattttctccacaaagcggaacaatttctgttgaatacgaagatggcagctcagagttacttccaaatcaatttgtacttatcgctacagggtcacgtcctcaaacattaccatttttagaaattaatcatcagaatattttatcgagcgatgatatattacaaattgatacacttccagacagtattgctattgtcgggggcggtgtgattggccttgaatttgcttccttactaactgatttaaatgtaaatgttaaagtgattgaagcaggtaaacgtatattaccttctgacagtaaatccatttctacatttttaagagatagtttaattgaacgaggtgtagaattttttgaggattgccaactaagtgaagagaatatcatacataaaaatgatgtcattcaaataaatataaatgaaaaaactactattacagttgataaaatattagttgcagtaggtcgtgtacctaatacaagtgatattggtattcagaatactaaaattcaattagatactcatgggtatatcaaagtaaatgaatttcaacaaacgagtgataagcatctttatgcggcaggtgattgtatcggaacattacaattagctcacgtagcttctaaagaaggaatcactgcagttgaacatatgtttaatgatcatccgcttcaagtgaattatcatttaatgcccaaatgtgtttatacttatccagaagtcgcatctatcggtttaaatatagaaactgctaaatctcaaaatattaaggcaacaagttataaagttccttttaatgctattggaaaagcagttattgaagaaactaaaaataaacgtggtttttgtgaaattatattaaataaagataatggagatattattggtatgagtatggtaggcccacacgtcacagagttaataaatgaagttgctttattacaatttatgaatggatcgacattagaattaggattaacgactcatgcacatccgtcattgtctgaaatattgatggagcttgggctaaaggctgaaaacagagcaatccacgtttaaaggaggaagtaaaaatgattgactacaaatctgtaggacttacagatgaagatttgagagaaatatataaatggatggacttaggtcgaaaactagatgaacgcctatggttacttaaccgtgctggaaaaataccctttgtagtcagtggtcaaggacaagaagccactcaaattggtatggcatatgcaatgaaagaaggagatatttcatctccgtattatagggatttagctttcgttacatatatgggaatttcaccttatgatacaatgttagcttctttcggtaaaaaggatgacattaattctggagggaaacaaatgccttctcattttagtcatagaggaaaaggtattttatctcaaagttctccggtagcaacacaaatcccgcactcagtaggcgcagcattagcattaaaaatgaatcaacaatctaatatagcaactgctactgtaggagaaggtagttctaatcaaggagattttcatgaaggattgaattttgctggagtccataaattaccgtttgtatgtgtaattattaataataaatacgcaatttcagtccctgattcattacaatatgcagcaacgcatctatctgatagagcaataggttatggtattcatggagaaactgtagatggaaatgatccaattgcgatgtacaaagcaatgaaagaagcaagagaaagggcacttaatggcgaaggagcaacgttgattgaagctattactactcgaatgactcctcattcttctgatgatgatgatacatatcgttctaaagaagaaagagatgctttcaagacatctgactgtaatcttaaattcaaaaatgaattactcgatttaggcattattgatgaagattggttaaacgaattagataatgcacataaatctattatagataaagctacaaaagatgctgaaaatgctcaatatccagatgtagaagaaacatatcaatatgtgtatgatccggaaggagatattttcaatgactaaaatgagttatatagaagccattcaaaatgcacaagacttggctatggaaaaagataataatatttttatattaggagaagatgtaggacgaaaaggtggtgtattcggtgctacacgtggtttgcaagaaaaatatggagaactgcgtgtaattgatacgcctttagcagaatcaaatattatcggtactgcaattggtgcagcaatgcttggcaaacgccctatagctgaaattcaattcgcagattttattttaccagcagttaatcaaattattagtgaagctgctaaaatgcgatatcgttctaataacgattggcaatgtcctttaactgttcgtgcaccatttggtggtggcgtacatggtggtttatatcattctcaaagtattgagagtatctttgcgtctacacctggattaacaattgtaattccttcaactccatatgatgcgaaaggtttattattatcttcaattgaatcaaatgatccagtattattttttgaacataaaaaagcataccgatttttaaaagacgaagtacccgattcttactatactatccctttgggtaaagctgatgttaaacgtgaaggtgatgatattacagttttcacttatggtttatgtgttaactattgtattcaagcggccgatattttagaggcagatggcattagcgttgaagtagtggacttaagaacagtttatccattagataaaacaacgattattgaacacgctaaacgaaatggtaagattttgcttgtaactgaagacaatcttgaaggtagtgttatgtctgaagtttcagcaatcatagccgaacattgtttattcgaattagatgcaccaattatgcggttagctggtcctgatgttccatcaatgccattttctcctaacttagaaaatgaagtaatgatgaatcctgataagatattaaaaaaaatgcgtgagttagcacaattttagggaggtaacataatggatgttaaaatgccaaaattaggagaaagtgtccatgaaggtacaatcgaacaatggttagtttctgaaggggatcatgtggatgaatatgaaccactatgtgaagtagttacagataaagtaacagcagaagttccttcaactatttctggtacaattacagagttaattgctactgaaggtgaaacgattgaaatcaatcaaaccatttgtaaaattcaacccgatgatacatctttaaattctaatcaagacgatactgacgaaactaatgaaacacccagtcaaacacaaagtaattctgtaaagagccagtctaagccttctaacacaaatcaatcatctaagcattcgatcaataatggaagattttctccagtcgtatttaagatagcttcagaaaacgatattgatttatcacaagtcccaggcacaggatttgaaggtagagtaaccaaaaaagatattgaaacttatattcaagaaaacaaccaacaaaattcaaaagaaacatataccactcagataacgaatcattccgaaacaacttcaagaaataataacgcttcattaaatgaaccattagacgattatacaatatcagttaaaggcgtgcgaaaagcaattgcccaaaatatggttaccagtgccactgaaattccacatggctggatgatgatagaagtcgatgctacaaatcttgtgaaaactagaaatcattataagactgtgtttaaaaaacaagaaggatataatttaactttctttgctttctttgtaaaagctgtagcagaagctttgaaatctaatccattacttaatagcagttgggatggtaatgaaattataattcataaagacatcaatatttcaatagctgtagctgatgaagataaattatatgttcctgtaattaaaaatgctgatgaaaaatcaattaaaggtattgctagagaaatcaatcaactagcacaaaaagctcgaaatcaacaactggctcaagaagacatgactggtggtacttttacagttaataatactggtacatttggttctgtatcttcaatgggtattattaatcatcctcaagcagcaattttacaagtagaatcaattgttaaaaaacctgttgtcatcgacgatatgatagctataagaaatatggttaatttatgtatttcaattgatcatcgtattttagatggtgttcaaactggacgatttatgtcgcaagtaaaaaatcgaattgaaagctattcaattgaaacaacaaatatttattaaaagtttgttatattacaaccaacctatttgaactatatgttgtaaattagtaaaatgacaataaataataattgactgaaaggtgattctaaatggatttaaattttgatttatatatgaatggtgttgtagaacaagctagaaatgaaattgaatctgctggttatgaacaattaactacttcagatgaagttgataaagtatttaaacaagatggcactacactcgtaatgataaattctgtttgtggatgtgcaggaggtatagcgcgtccagcagcaagtcacgcacttcattatgataagttacctaatagattggttactgtatttgctggtcaagataaagaagcaactcagcaagcaagagactattttgaaggatacgcaccttcaagtccttcatttgcactgatgaaagatggtaagattactgaaatgatagaacgccatcaaatagaaggtcatgacgtaatggatgttatcaatcaacttcaaaagttatttgataagtattgtgaagaaagataagaggaacaatacatgctaactttaaatccttatagaattggatttagaacacttaaaacagctgtaggaattactttaggtgttattttagctaaatggatagggcttgataactatgcttcaagtgctatcctcattgttctatgtattaaacatactaaggttcactcactacaagcaattggttctcgattcgtttcgtgtttattaatgttattttttggttcatttatttttaatttacttggtcaaaatgcaatcgttttaggattaattgttttattatttattccacttacagtgatgttgaatgttcaagaaggtgtagtgacaagttgtgtcattttacttcacgtatttaatgccaaagttattgggcttcatttaattattaatgaaattttacttcttatcattggcttaggaatagcatttttaatgaatttaattatgcctagtctagataatacattaggtaattttaagaaagaaattgaaaatgaaattaaaacaatatttacacaatatagtgaagcatgtttaaatattaataaacaattgtcaatttcttttgatacattagaaaacaatattcgtaaggctaaatctattgcttttagagacgttaaaaatcactttgtgcgaaatgaaaactcatattatcactattttgatatgagagaagaacaactagaaatactacgcagaatccaaacattaattcataatacttcagctaatgatcctttgttagagactgttgcccatttaatggctgaaattggagataatgttaatagtaatgattatactgtattaagactacattcattatatgagatacgtttaaaattagacgaattgccattgccagaatcacatcaatctttaaaatcaagagcaagtatgatgcaaattttaaatgaattagaagaatatttaaatattaaatctcaattcggctctttaaaattacatagtgaaatataacatctaagattaacttctaatcaaagtaaaaagacaaactttctttaaatacaaaaagtttgtcttttttatttgcataattttaagaaataataataaaaactatcgtcaaattcgaatttttgtcgatagtttttaatctaattaatttttaatgcatgagaggaacaagacttgtaagtaacaatgcagctacaactgcaattaacatgataatgataataatctttagcactttattattcaatgtaaacgctccttgaaacctttaaaataatttgattattcgttatattaataacttatagtatataaaataaccttaaatgatttcgataaaaatggcaatcaatttatttactctaattgtcaaagtcagttaaaatattatctatataagaaaggggttttcataatgattaatagtcgccgtttacttaatacttttttagagttagtgcaaattaattctgaaactgggaatgaagaaacgatacaacccattctaaaaaagaaatttatagatttaggattaaaagttgtagaagataatgcgtctaaaagagaatggttaggtgcaaataatttaatttgtaccttaccaagtagtaaaggaaaagaacatgtttctaaaatctattttactagccatatggatacggttgttccaggtattaacgttaaaccgatccttaaagaagatggctatgtatattcaaatggcacaactgtattaggagcagatgataaagcaggtatagctgctttgttagaaatgattcaaactataaacgaacaacaattacctcatggacaaattcaatttattatcactgtaggagaagaagcaggtttaaaaggtgctaaagaattagatcaaaacttgatagatgcggagttcggctatgctgtcgatgccagccaagcggttggaacaacagtggtgggtgctccaactcaaatgattatcaatacaactatttatgggaaaacagcacatgctagtaaacccaaccaaggtataagtgcaattcatattgcagctaaggcgattaataaaatgcatttaggtcagattgatcaagataccacagcgaatattggtaaattttatggtggttctgctacaaatattgttgcagataaagtcattttagagggagaagctcgttcgcataatgataaaagtttagaatatcaagtcaaccatatgaaagagactttcgaaacgacagcaaaagaattaggaggtaaagcaaacgttgaaatttctaagagttatcctggttttagaagaaacgattctgagactgtaactcaatatgctataaaaagtgcgaaaattttaggcctttcaggtaaaactgttattgctggcggaggttcagatggaagtattattaatacgtatcatattccaactgttatattaggtgtaggatatgaacatattcatactacttctgaacgtattcctgtagctgctttaaatcaacttacgaatcaattgattaaaattgttgaattagtagcgaaataatattttactttagtgaagtcatttatatttttgtgatacaatactaatgaaattattgaataagagaggtaagtaatatgactcaacaaataggtgtagtaggtttagctgttatgggtaaaaacctagcatggaatatcgaatcacgtggttatagcgtatctgtttataaccgttctagtgataaaacagatttaatgattaaggaatcagaaggtaaacaaattcatccaacgtattctttagaagattttgtaaactctttagaaaaaccacgtaaaatattattaatggttaaagctggtcctgctacagatgcaacaattgatagcttattgcctttattagatgacgatgacattttaattgatggcggtaatacaaactatcaagatacaattcgtcgtaacaaagcacttgctgaaagtggtatcaactttattggaatgggtgtttctggtggtgaaatcggagcgttaactggtccatctttaatgcctggtggtcaacaagaagcttacaacaaagtaagtgatattttagatgccattgctgctaaagcaaaagatggtgctgcatgtgtagaatatattggaccaaatggtgcagggcattatgtaaaaatggttcataatggtatcgaatatgctgatatgcaattaattgctgaaagttatgcaatgatgaaagaattattaggtatgtctcatgaagaaatttctaaaacgtttaaagaatggaatgctggagaattagaaagttatttaattgaaataacaggcgatattttcactaaattagatgaaaataatgaacctcttgtagaaaaaattcttgatactgcgggtcaaaaaggaactggtaaatggacatcaattaatgcattagaattaggtataccattaacaatcattactgaatctgtatttgcacgtttcatttcttcaattaaagaagaacgcgtaaatgcatcgaaagtattaagtggccctaaatcaaactttgatggcaatagagaagacttcttagaaaaaatccgtaaagcgttatatatgagtaaaatttgttcatacgctcaaggtttcgcccaaatgcgtaaagcgagcaatgaaaatgaatggaaccttaaattaggtgatttagcaatgatttggcgtgaaggttgtattattcgtgctcaattcttacaaaaaattaaagacgcatatgacaataattcaggtcttcaaaacttattattagacccttatttcaaaggtattgttactgaatatcaagatgcacttagagaagtagttgctactggtgttaaaaatggcgtaccaacacctggtttctcagcaagtatcagctattatgatagctaccgttcagaagatctacctgctaatttaattcaagctcaacgtgattattttggtgcacatacgtatgaacgtaaagataaagatggtattttccatactcaatggactgaggaataatcattgtaggattaaaaatctgggacatcattaagtgtctcagatttttttattatgacagttttgtatagatgtcttaatacatatagccttgctatttaatttacatttaatcgatatatcccaagttgacatttagagactcgattagtacgataaatataggtgtaaacgttttctaaataactggattatcgctatataatgctattacatattattttatatttatataaatccagaaaaatttagattatatattgaagactaacattgactattaaatatttaactcgaatattatgattaattatttcaaagttaattgatttacataatactttcaaaggagcgatataaatggaaaaaaattggtggaaagaagccgtagcatatcaagtgtatccgagaagttttaatgatagcaataatgatggtattggtgatttaccagggatggtagaaaaattggactatctgaaagatttaggtattgatgtcatttggcttagtccaatgtataaatctccaaacgatgataatggttatgatattagtgattatcaagatattatggaagaatttggaacaatggaagactttaatcatttattatctgagactcataagcgtggaatgaaattaattttagaccttgttgttaaccatacatctgatgaacacccatggtttatagaatctcgttctagtaaagataatcctaaacgagattggtatatttgggcagatcctaaatctaacggttctgaacctaataattgggaaagtattttcaatggttcaacatgggaatatgatgacacaacaaaacagtattatttccacttatttagtaaaaagcaacctgatttaaattggagtaatcctgacgttagagaagctgtttttaaaatgatgaattggtggttcgaaaaaggaattgatggctttagagtcgatgcgatcacacatatcaaaaaaacatttgaagctggtgatttacctgttccaaaaggaaaacaatacgctccagcatttgatgttgatatgaatcaaccaggcattcaagattggcttcaagaaatgaaggacaaatcacttagccattatgacattatgactgttggcgaagcaaatggcgtaaatccagataatgcaaaagagtgggttggagaaaaagaaggtaaattcaatatgattttccaatttgaacatttaggtttatggagtactggagactctaaatttgatgttttatcttataaaaatgtattaaaccgttggcaaaaacaactagagggtataggatggaatgcactatttattgaaaatcatgatcaacctagacgtgtttctacttggggagatgatacaaagtattggtttgaatctgctactagccatgcagtggtatatttcttacaacaaggcacaccttttatttatcaaggtcaagaaattggtatgacaaactatccatttgaaagtattgaaacatttaacgatgttgctgtaaaaacagaatatcaaattgttaaatctcaaggtggagatgttaatcagttattagataaatataaaatggagaatcgtgataattctagaacacctatgcagtggactaatgaagtaaatggaggttttactgaaggtacgccatggttcccagtcaaccctaactataaaacaataaatgtagcacaacaatccgaagattcagattccgttcttaatttttataaacgtctaattaaattaaaaaaatccgatgatatatatacttatggtgaatttaatttaatcgatgatgcgaatgagaatatttttgcttacacacgtaaacttaataataagacagttctagttgcaggaaatttaacagatcatgttacatcattaaatttaccatttgaagttgaagcatctcaaattaagctacacaattataaaaatgatttagatatcactaatatgaaaccttttgaagcattcgtagccgaactttaatagtaaagcgttagatgacataagtttaataacttagtcatctaacgcttcttttattctatatcataagtttcttgtttaataggtagccataattgtattttagtgaacgggtcctcgaatgagagatcaaaaggataaatttcaacatataagctatttttttcatagggtagagtaagttgtaagctggattcaatataataccaagcttcattaacagtataatccacttgaccttgcaaattaaattttgcatagtgtcgccctggtaacaatcggctttctaagtgagctggataacgttcactaggtacgcccacaaataattctacaccttcatctaaaggacatgtaataacaaataactcatatggacttatattattatatcgttttaattcttttattttaccatctaaatataaatcttctaaaaagtcaggaactttgtaagggttagatagttgattagcctcaatatattttacatatccaactaaaggtgtgtctttagtcgtttctagtctgtaagggtatggtgctctttctgtagttgttaatttaatatacaagcgttcattcatttttagttcttcttttttagtagaagcttgaataggagatattccatgaaaatcactaaaatcatttgcaaagtcatttgaacttaaataattatagcgttttgctacatcaactaatctcgaagaactttgtatcatttctttagcagcttcagtcatttttcgagagtgagcataactttcaggaggttgtccaacaatcattttaaacgattgatcaagatggtaaggagagagaccaacgtaatcacttaaatcttgcaaattaaaaggctctaataaatgatcttctatatatacaattgcctgttgtatctgcttgataacgtccaaaactttcactccaataaatttacaatcaatactaatattttacattattttataaaaatatacatcaataatataaaattaaattaaatttttaaatgactctttcaatattcaatttaaaaaggacaagaccttattttcaatgagtgaaaataatataatgtgtcttatcctttatacatttatcacatgaaacgtctagtatatctgtttattgaatatcgtcccaccaatgatttccgtctctgcttaataataaatcactttcgatagggccatttgtccctgatttatagttagggaagtttggatcaatcatagtccaatgttcttgaatagcgtctacaaatttccatgtagatttaagttcttcccaatgtgtaaagttcgttgcatcacctttaagacaatcgaataacaagttttcatatgcatctactgtgttcattttatcttgtgcactcatagcataagacagttgaacaggctttgtttcgataccttgaatacttttcttagcatttaagtgtaatgaaataccttcattaggttgaatattaataactaataaattagaatctagtaatcgatccgtttgataatataaattcataggaacttctttaaattctacaacaacttgtatacatttagacttcatacgcttaccagtacgaatgtagaatggtacaccagcccaacggaagttatcgatagttaatcttccagaaacaaaggttggtgtattggaatcagatgcaacacgatcttcatctctataagcgataacacgttggtcattaatagttccttctccatattgtccacgcacaaagttttgattgacttcttcaggttttaattgtcttaaagattttaatactttcaccttttcagctcgaatatcttcacttttaagactaataggtgcttccattgctagtaatgcaaccatttgtaacatatggttttgtaccatatcttttaatgcaccgctcgattcataataacctccacgatcttcaacacctagtatttctgaagaagtgatttgtatattagagatatacttattattccaaagaggttcaaacatcgcattagcgaatcgtagaacttcgatattttgcaccatatctttaccaagatagtgatcaattctgtatatttcttcttctttaaatgattgtcgtaattgattatttaatttttcagcagatttaaaatcactaccaaatggtttttcaattacaaggcgtttaaatcctttagtttcagttaagccagaagcttttaaataatcagaaattggtccaaagaattgaggtgccattgctaaatagaataggcgattaccttctaatttaaatgtatcatcaagttcattagagaatgctaataattcatgataactttcttcttcattgacatcatttttaaaataaaaaacatgttctatgaattcgtcgagtcgatcagtatctttgacgtgcgtttgaatagattgtttaacttgttcacggaaaaagtcgttagtataatctcttcgaccaacgccaataatggcaatatgtttatctaaattatcttgttgatataagtggaataaagaagggaataattttctatgactcaaatctccagttgcgccaaatatagtaattaaacaagggatatgtttagtgtgtgtgttcaaattcaaaacctcaattctttaattgctatgattaattcattataaattaaaactgtttttcttgatatgtttttgcctaaaattgttgataatatttacaatattaaactaaataacatacaatttattttttataagttacattataccctaaattctgataaattcatttattttatttcatatgataacaaacttatagacgtatgataaaatatattgaagaaagaggaggcaaatgcatggaagttacattttttggaacgagtgcgggtttacctactaaagatcgtaatactcaagcgattgctttaaatctagaaccttattcaaattcaatatggttattcgatgtaggagaggggactcaacatcaaattttgcatcactcgataaaattaggcaaagttgatcatatttttatcacgcatatgcatggcgaccacatttttggattacctggattattaacaagtcgttcattccaaggtggagaagataagccattgacgttaatagggccaacaggtttgcaacaatttattgaaaccgctttgaaattatctgaatctcatttaaactatcctattacatatattgaaattgataataattttacatatcatcataatggctttacagtttcatcaaggttattaaatcatggtataccttcatatggttatcgaattgaagctcctacaacaccaggtacaattgatgtaactgcattaaaggctattggactagaaccgggccctaaatatcaagaagtaaaaatgtttgatacttttgaatataataatcaaatttatctttctaaagactttaaaggtccagccaaaccagggcctattgttactatttttggagatacgaaaccatgtgataacgaatatatacttgcagaaaatgcggatattatgattcatgaagcaacatatattgacggtgacaaaattttagcaaataactatcatcatagtcacattgacgatgtatttaggttaattcatcattctaatgtgaagaaaagttttattacccatctaagtaatcgatataatttagatgatatagaagagataaaccgtgcattaaaagaaatgaaagatacaccaaactttgagtttgttaaagactttgatacattcaaattttaaataatattagcgttttaaatgctacgtaaaaattcaaaaaatagctataacgatatgtatgacttaattttcgttatagctatttttaatatttattactcatcttcacttttagaaagggcgatacttctatgaactgcagcatctagacaggctttaaaaatactctcaatatcatgtcgatcaagttcatttaatccagcttgtgttgtcccacctttagaggtaatattttttctaagttgttccatacttaaatccgatcgttcaatcatcttacttgttccaataatgagattcttaatggattcttcaacttgttttttttcaagacctaatgatgttcctgctttaacatattgttcaaatacatgatataaaaaagctggtccgcttcctgtaatagccgtcacttgatgtaaatattcttcgtcaacttcaataactgagccaaaagcactaattaattctgttacttcatctttagaatgaggatcgaaattaccagaaaaactaatacctgttactgaatgacctacctgtgcatttgtattgggcataattctagcaacgggattattcgtttctaacttttctcggatataatttatcgataaaccagccataatagatataaaacgatggtctgattgtatatgtgatttaatacgtgatgcgaccgtttcaaaatcatgaggcttagtacctagaaaaacataatctgcatcttttaataaaaatgcatcatcgtaactatattttactcctaattctttcgcaaatgattttaacgtattttcatttgatttatttgttaaataaatatcgttatgatttaatattttagaatcaataattcctttaaaaatggcttgtgccatgttaccagcgccataaaatactaacttcataaaacagcaccatccttacccttaattgataaaactatagtaacatattcaatataattattatcaaaaattaactatacttgttagataggagagagtcatccgtgattgtaggtaaacatttcatcgtaactggaggaactagtggcttaggtttagaaataacgaaagaattattaaaaaaaggcgcatatattaccctcattgttcgtagtacggagaaattcgaaaatattaattttaatccgtacaaatatcgtgtttcaatgattaaatgtaatttacaagatacttcacaaatagataatatttctaaatccctttgttatccgattgacggaatcatttatagtgcaggtttaggcttttttaaatcaatacaatctcattcgttagaagaaatcatggaaacttatgatgtgaatgtgcttggttttattacattatttaaaactgttaaaccctatttaacaatgaacgcttttatagtggctatttctagtcaggcagcatttgtaacgcaagcgaatgctgcattttatggctcatctaaagctgctttaaatggcgtattaaatgctctaagaattgaggaacaagactttcatgtaatgactgttaatccaggtcccattaatacaccatttcataaaaaagcagatccatcattgaagtatgctaataaatatgcatcactaatgatagatcccaaaatactcgcagaagacatcgttaaaggtatcatcactcgtaaagtagaaattaacaagccgctatggatgaatccactattaaaactttaccaattagctcctagaaaaattgaaaaatattttacttcattgtttaaaaataaaatataatttaacctaaaaaagtgatgaagcattcatcatagatacttcatcacttgtactttacatcaacgattgtttataagaatctataataatgattccttactcaagatgctgagtatattccaaatctttcacacggtgacgtgcagatttaatttgatccaaacttactgttttattaaaattagcaatattatcttttaattgtgaaacagaacttgcaccaacaataatagaacctaatgcatcatgggattttaaatattcgaatgataaagcacttaaattactttcaacttccttaacagaagcaatcgtttctcctaattcatgataattatagtcaaaaataccatcagagaatttctgatcaagtacattaacactatttgaagtaagtaaccctttaaacacgggaccacgtgctaaaacttttacgccatgagaatgaatatgattcaaaagacgttctggacgattatcaataagattaaattgagacataatcgtttctatttgactgtgttttaaataatactcaatcacgttaggtctaatagaagagattccataagctttgattacaccttcttttttcagttcatcgaatgcactaatcgtctcatctaggggatcatcaattgtacctccgtgaagttgataaagatctaactgttctaagcctaaacgttttaaagaacttttaacactttctttaatatatttttttgaaggatcccaagtagtactaccatcattaagcggtctatttcctacttttgttcctataacaatatcatctctattttgatatttctttaaagactttccaacaatgtcttcattgacccctctatcataaatatctgcggtatcaaaatatgtgataccattttcaattgcacactcaataatttcttctgcgtgatgatattctgtgcctaaactcatacagcctaaacctagttccgaaatttcaatgccactttttaatatatttttttgcatgaacaatctccttccgatacactttagttaacgcatttatcttatcaatttattaacttaatgaaaagggacgtgaatataatggactttaatgaaaaaacttttgatagaacagtcatttataatggtaaaattatcgatctagaattacacgatgtggaattaccagacggaaaaacttccaagagagaaattatcaagcataatggtgctgtggcaatttgcgctattactccagaaaaagaagtattattggttaaacaatatcgtaaacctattgaaaaacccttgttagaaattccagcaggtaaactagaagaagatgaagatagagaagaagcagcgaaacgcgaattagaagaagaaactggctacaaagctaatcatctaacgttcatcactcatatgtatggttctccaggattttcaaatgagaaactaaccatttattttactgatcatttaagtgtaggagaattaaatctggatgatgacgaatttgtagaattgcataaaatacacttagacgatatccatgcacttttagaaaaccatgaaattgaagatgcgaaaacaataattgctttacaatatgtattatcaaattataatcattctaaataagatgtgataactacttgatttttactaaatttattggtaatttattaactgaaataatttagtttaaaatgattataattaattgaggggtgatgctcccgtggaagaacgtctaaatagagtaaaacaacaattacagcaatcttcttataaattaacacctcaacgcgaagcaacagttcgtgtgttaattgagaatgaaaaagatcatctcagtgctgaagatgtatatttaaaagtaaaagataaagcacctgaaataggtttagctactgtttatcgaactttagaactacttgctgaattaaaagtagtagataaaattaattttggtgatggcgtagcgcgatttgatttgagaaaagaaggtgctaaacattttcatcatcacttagtttgtatggaatgtggtaaggtagatgaaattcatgaagacttactaccaaaagtagaagaacgtgttgaatcagaatatcaatttaaaattttggatcatcgcttaacatttcacggtatatgttcagaatgccaagctaaaggtaaataataagttaaacctaataaagtgttgtatcaactctatatacaaatgcttgaagaacttttcaagataaaaaagtaatatgtaataattaatcgatagaaggtgtgaaattaagaatcaactttgaattctatttcataccttttttatataaacagaggtgtaatatgaatacgattattgaagaatttttaaaatttattcaaattgaaaagggattgagtgaaaatactatcggcgcatatcgacgtgatttagctaaatatgaagaatacatgaaagaacataaaattgctcatatcgattttattgatcgccaagttatacaagaatgcttaggatatttaatagaccaaggtgcttctgctaaatcaatggcgcgttttatctctacaattcgcaattttcatcaatttgcacttagagaaaaatatgccgctaaagatccaactgtcttaattgaaactccgaaatatgagaagaagttacccgatgttttagaagttgaggaagtcattcaacttttggaaacaccggacttaaataagaaaaatgggtatcgtgatcgtacaatattagaattattatatgcgactggcatgcgtgtttctgaactgatacaaattaatattgaggatataaatcttattatgggatttgttagagtatttggtaaaggtaataaagaacgaattataccattaggagacactgtgattgaatttctagatacgtatttagaaaagatacgtcctcaacttttgaaaaagactattacgaatgtattgtttttaaatatgcacggtagacctttaactagacaagggatatggaagatgattaaacaatatggttcaaaggccaatattaataaaactttaactcctcatacgttgagacattcatttgctacacatcttttagaaaatggggcagatttaagagcagttcaagaaatgcttggtcattcagatatttcaacaacgcaactttatacacatgtgtctaaatctcaaatacgacaaatgtataatcaattccatcctagagcttaaaaaaaaagaaagaaaagtgaatgatttaacttttctttcttttatttttaagtgctttttttctagctgcaatgatatcgcttctatctcttagacgatgacaatgaacaatcatgtcatcattgttaatttgtgtcttatattcataattaggatataaattgataattttcctttctaccgcagatttaattggcaactgtattggttgaaatgtctgatcatgtttcactttttctatttgattttgaatcaataaagtaaattcattgacctttaaaccaagtgtctctttatcttttgcatgcttaaatgtatataacgcttttttaaagctttttaatgcacctaacttattacatcgtctatagtgatacattgcagttgaaaatagtattaaactaactacagcatctttcttagaaaaattaggttttgacttccataattcttctaaaatatcatgacataaaaaataatgttggtgtgtatgaaattgatagtagaagtgacttaatgctttattcatgaatactcatccttaatttaattctaatatatattcatgctataatatttaagtgaattatgcacaatttagattttataatacaaggaagttaatttatgtacgaagttaaattagatgcttttaatggcccattagatttacttcttcatttaattcataaatatgaaatagatatttatgatataccaatgaaagctttaactgaacaatatatgcaatatgttcatgcaatgaaagaagttgaaattaatattgcaagtgaatatttagtgatggcttcagagttattaatgataaaaagtagattattattgccacaacaagaaactgaaaattacttagaagaagatcctcgtgaggaacttgtaggtcgtttaatcgaatatcaaaattataaagaatattctttactattaacagaattaaagaaagaacgagaattatattatactaaatcaccagctgatttatctcacttagaaaaagaaacgcattgggacaaaaatcaaacgattgatttgactcaactgattgttgcataccaaagagtaaaaaatagagtagcattaaatacgccaaaagcagttgaaatttcaaaagatacttttacaattcaacaagctactgaagtggttgctaaacatttagagaaacaaacatcatttaacttctttagtttatttaactttaatgaatctgtgagtaaagtcgttacacatttcttagcaatattagaaatgtctaaagcaggtcttattaatatagaacagtcaaataactttgaagacatcaatatcattagaggagtgaactattctattggataacattggcattatagagtcattattatttactgtaggcgatgaaggactcgaagcaggtcagcttgcagatattttaaaaatggatttagatgaacttgatcaattaatttcgacgtatcattcaaaaggtcttgaaatacaaagatatggttccatttatatgttaacctccaaaaaagagagtgcaccttttatcgaagtattagtgaatcaaaaagcaaacatgaaattatctcaagctgctatggagacactatcgattattgcttataatcaaccattaactagaagtgatatcgaagtaacaagaggtatcaattctgatggtgcagtgagaacattaattgctagaggacttattgaagcaaaagacatggagaattcgcgtagtcatttactcatgactactgatttatttttaaatgtttttggaatgaaatcaatagaagaactaccatctactgaagaagataacgaagagatcgaaaatttctttagtacacttacagagcaaaaggagaaataaaatgaataaagatttagaaagacttcaaaaacgaattgctaacagtggatatacatctcgaagaaaggcagaaactttaatcactgaaggtaaagtaaaagtcaatggtcaagtagttacggaacttggaacgaaagttaaatcttcagacactgttgaagttgaaggaattaaaattgagcaagaagataaaatttatattctgttctataaaccaacgcaagtgattactagtgtttcagatgatagaggtagaacggttgtaacagattattttaaagatttagaagcaagaatttatccagttggacgattagactatgatacttcagggttattattacttacaaatgatggtgaatttactaacctgatgactcatcctagatatcatattcagaaaaaatatgttgcaaaattaaaagggtatttaatgagagaagaagttaaagcattagaacaaggaattgaattagaagatggttttacacaacctgctcaagttaaaataaaaaatcaaaataaagaaaaaaatacgacactggttgaaataactattagcgaaggtagaaatagacaagttagacgtatgttcgaacattttaatcacacagtcgataaattaatacgaatcgaatttggaaatcttaatttaaaaggtttaaatgcaggtgaaggtagagtattaacacctcatgaggtgaaaatattaagacatatggctgaaaatggcaattaattcgaaataacttaacaatacaaagtattttcacaattacaatgtgtatctttttttatttattcactgtaataataaatcataggttctacatcaaaaaagatattttgctatttttttcacaaagtcaattgaatagaaagctttaatatagtgaatatgctataattaaaatggtatagagcatgtgtaggaggtatattgtaatgatgaatgaaatattaattgtagacgatgaagatagaatcagaagattattaaagctttacttagaaagagaatcgtttactatccatgaagcaagtgatggtagagaagcatatgaacttgctatggaaaatgactatgcgtgcattcttttagatttaatgttgcctgaaatggatggtattgaaatgtcatcaaaattacgtgagcataaagatacgcctattattatgcttacagctaaaggcgaagaaactaatcgtgtggaaggattcgaatcaggtgcagatgattatatagtgaagcctttctctccccgagaagtcgtattaagagtgaaagcattactacgtagaactcaaacatctaaaccagaacaaagcgaaccacatgcaagagatgtcattgagtttaatcatcttattatcgataatgatgcacatcgtgtattagcggatcaacaacaagtgaatttaactccaaaagaatatgagctattaatatacttagcaaaaacacctaataaagtatttgatcgtgaacaactattaaaagaagtttggcattatgaattttatggtgatctaagaactgtagacacacatgttaaacgattaagagaaaaattaaatcgagtttctgaagaagcagcacatatgattcagaccgtttggggtgtcggttacaaatttgaggtcaatacaaatgatgaatcgactaaatagtgttgttataaaactgtggttaactataatatttatagtaacgacagttttaattttattaagtgcagcattaattacatttattcaatattattacacccaacaaacagaaaatgctataagagaagatgcttcaaggattagtcatcttgttgaaaaagctgataacaagtcacttgccatacaacatagtcaggaattgattgatggtacaggtggcgttattattatgtctaataaaaatatgtcagcagaaaaatcatataatctgattaaaaaaagaatgttaaaagaaatacaaaacaatgacaactttaataaagtatttgatacagggaaatctgccacacaaaacgtcacaataagtgaaaaaggagcatcccattcttatattcttttaggatatccgatgcaatctcaaaatcgtaaacatgctaagtttagtggcgtatttatatatcaagatttaaaaacaattgaagatactaataatgcaattaccattattattttaattactgccattgtatttttaattgtttcaacgatttttgcgttctttttatctaatcgtatcactaagccacttagaaaattaagtacacaggcaatcaatgtatcgaatggagattactctcaaaaaacaacagtaaatacgaaagatgaaattggtgaactttcttatacgtttaataatatgagttataaaattcaagaacacattgaagctttatctactcaaaaaaatattcgtgatcgtttatttaattctatgattgaaggtgtagtgggtttaaatgataaaagtgaaattattttatctaacaaaatggcagaccaaatactaccgacaattgataaatctatttattcagaaattaaaaatcaaattaatgccacatttcattcaaaaggtacagagtttaatgaatatataataaactctaagtattatgtgtttataatgagctatattgatcgtattcaacaagatggtcgtagcgggattgtaatcatcataagagatatgacaaatgaacataatcttgatcaaatgaaaaaagattttatcgcaaacgtatcccatgaactccgtacaccgatttcgttattacagggttatactgaatcgatagtcgatggcattgtaacagaacctaacgaaatcaaagaatcactatcaattgtattagatgaaacaaaacgacttaatcgccttgtcaacgagcttttaaatgttgcaagaatggatgcggaaggattagccattaataaagaaatacagcctataatgccattattacgtaaaatacaacttaaatatcgtcaacaagcacaagatttagaactaaacatagacttgttaccaaatattaatgaagatgatttatggaattacgatgctgatcgaattgatcaagtactcacaaacttaattgataatgcaacacgctatacacatcctggagattcaattacgattactgctaataaagatagtcagtatcaaattttaaatataaaagacacaggtagcggcattgctcccgaacatcttgatcatgtatttgatcgtttttataaagtagaagcttctagaactagaggtaaacaaggaactggtttaggattatttattagtaagatgattattcaagagcatggcggaattatttctgtagaaagtacagtgaataaaggcacaacctttattattaaattacctaaaccttctatagattctaaataattaactttcgacaaaataagattaaatatccaaattatttgagattacgctcttcaaagttaaagataaaactttgaagagcgtttttatatctatagtttttttaatatcatatttcatttcatattaatttaaaatcagtcgacgaaattgatgaaccatatctctcatttttataaataaacagagatattgcaatgaaggagttattcatgtaatataaattttaaatgataaattcaataattcatcttcggggtagggtgtaattcccaaccggcagtaatttgagcctgcgacccgcttcaatggaagtggctgattcagtgtaaatctgaagccgacagtatagtctggatgggagaaggtggaggttttttgttgtgtaaaagtatcctccaattcttagtaagatgaatggaaggagaaaactgaatatgcaacaaaataaacgtttaattaccataagtatgttgagtgcaattgcattcatattaacatttttgaaatttccattaccatttttgcctccatacttaacattagattttagtgatgtaccgactttattagctacttttatttttggtcctttatctggtcttcttgtagcattaattaaaaatatattaaatttcttatttaatattggcgatcctgttgggcctgtggcaaattttttagcaggagctagttttttactaacagcttattttgttagtcatcgtaaacaatattcatctcgtcgttcactaattataggattagttgccggcactattgcaatgactatcgttttaagtattttaaattattttgtcttactacctttatatggcatgatttttaatcttggtgatgtatttactaatttaaaagtaattattttatctggtattattccttttaatattattaaaggatgtgtaatatcgattatttttatcttgctatatcgccgtttaaaaaaagtattgaaataaaatcaaaacctccgatgacttcttagtaggaatcatcggaggttttatattataattatggtaatgcaattttatttacggatttattcaaattttaaggcatctccatcaaaaggctcttcttcaattttaattgaatcagttggacagccttcaagagcatcttccatatcttcatataattcttctggtacttctgcagtaccttgattatcgtcaaggattacgaaagcaataccttcgtcatcataatcgtaaatatctggtgcagcagcgccacaagcaccacaagcaatacatgtatccatatcaacgattgtgtactttgccattttattcgcctcctttgataaaaatgctacactagtcataataaataattttattatattctagatataaaagttctataaaagaggagttcactcatgcaagaaatgattagttatgttaaacatcactcattcaattataaaactaataaaagtatatataatattttaagtggaaaaaagtcacatcaaacgttttttgatgcgagctctcaacaacttttatcattatatcatagtttacctaaattaaaatatcagacatttgaacgacttttaaataaaaatgatataaaagaattaaatatcaaggtgcatcctcgattcacttatgatagtcttaataatacttttaaatgtattcaattattaattcagacgatatctcaatatctccatcatcaacttaaattcgtaccaatgaaccaacaggttattattcaaaataaagttaaaaaggtttatggaactattattgaaaatgatttaataaaagactttgaaaatgaagtgactgatttatttcaagcaatcagtttaaataataataataagtgttaccttcattattatttgcatggttatgatgagcctatgtatacaagacaacaggtaagtttgattgagaatatttctatttcaaaattatatacattagaattgaataatttagtcaccttaggaagtgaaattgaaaataaacaacgttatcctatattgtctgaatgtattattctttcatcattattaaataaaacatctattactcaacaatatcttcatcaaggtttgagtttaaatgaaatcgcaattgcacagaatgttaaacttaatacaatagaagatcatattttagaattatttattaaaggttatgagaaaaattacgaaaattatgtgggaaaaaaagatatttttcaatttactcaatactatacagagcataaaggagaaagattaaaacgatataaacaagagtttgatcatttatcatactttgaaattaaactcatgattgttgggatagaaagaggtgaaatgaatgttagagaacaatcttaaacaatggtttggacatgaaagttttcacccaggtcagaaagaggtcatagaaagtgtattacaaggcaatcatacacttggtgttttgccaacaggtagtgggaaaagtctgtgttatcaatttccaacttatatgcaacaaaaacctactcttattatttcaccgctaatttctttaatggatgaccaagtgatgcaacttaaatctcaaggtgaacgaagggttgtgtgtattcattcaggtatggatgaacaagaaaaaaaagaaaatatcaatgtattaaatcaaagtcgttttatatttctaagtcctgaatttattcttcaatctcatcatttcaatttaattaaaaacattccatttggtttagtagtattagatgaagcacattgcttatcagaatggggatatgattttagaccgcattacgcacttattggtcaaatcactcatcattttaaattagcgactattttagcattaactgctactgcaccgccacatttaacaagtgatttagaacatattttaaaagttaaattaaacactatacaaactactatgaatcgtaaaaatatttcgttatcacattttaatttcaaggatgacgacgaaaaaatagaatggttattgaaatttattgaatcttcaggtcccacaattatttatgtatcatctaagaaaatatgcttacaactcgcaaaactcatttatcaacatggatatttaactggtatttatcatggggatttaacttatcaagaacgtcaaactgttcaaaatcaatttattaataattttattccagttattgtagctactagtgcttttggaatgggggttaataaaaaagacattcggactgttattcattttcatttatcatctagtccttcaaattatttacaagaaattggacgagctgggagagatggaaaacaaagtcaagcgattagtctatatcaaccagacgatgcttatattctagagacgttactctttaatgatgctatcgtatcagaagatgtcgaaacttttgagttaggcgcattccttccacctaataaagaagaaattttaacagtattacaccaaaattatacatttaaagaattgaaacacatttttaaaacctcatatatacgtaaacaagctggttatcaaagaatcataggttatactcgtatagatcaatgtagaagaaaatttttactggaattttttggagaatctcctaatcaatctaatgaatgttgtgacaatgattcagatttaagtaaaattgagtgttacaacagaaaaaaagttaaaagacaatttactttcaatgaaaaaattaaaaacttatttagagtttagtgactttactttactaaaatattttatacaggatataattaaattacaaaatgatttataagaaatttaaaaaatgatacatatttatgcattacttgggtataaataatgtgacaattaaaataagaaaaagaaaggatgttgactatgtctagagataattttaaggatgattttgaaaaaaatcgacaatcgatagattcaaacgatcaattcgatcgtgtaaataatgaaactaacgatgaaatagacaattttaacaatgaaactgatcaacagtttccaccaagaaatgcacaaagacgacaaagaagaagaaaccaatcttctagtcgtaacaaaaaatttaacgatcaggttaatgattatgaagaaggttcattagatgaccgttatgatgaggaaacatttgacaaagtacataacgaaagtaactctcatcataatcacgagaatgatgagaataatcaacgttccaatatagatgagcattatgatgaacgcaaccgtcattctaatttaaatgatcgtcataatgatgatgatcgtcgtaataattctaatcatcgttttgaggacgatagttatgaaaatgatgataatagtgatgatagaatgaatagtgatcatcgtcgtcatcgtgattttgatcaagataatgatagacatgaagatcatcattccaaaatcggaaaagatgcaactattgctggaggagttgctgctactggagctgttggagcaaaagcatcacgtaataaaaaacgtaaaaataatcgtcatgatgaggaaaattatagagataatgaaaatagaagtgttcaacatgacaacgaagataataatgaactagataataaacatcacagaaaaaaaggaaataaaggcaaaaaagctgctgcagtcggtgctggcgcagctggagcaggtgctgctggtgctgctgcttctaaacataaacatcataatgaacataacaatctaaatcatcatgatgatgataaacatcgtgaatacgaagataatgatggtttccaagcacataacggtaagaaaaaacgtggtttaatgggaattttacttccactcatagctttattacttattttagctgctctagctatttttattggcatgtatcttaacaatgaccataaagataagaataataacactgcagataataaaacagaacaaactgagaacaaagataaagacaaagacaatgctacaaatgaaaaagaccaatcaaatgaaacagcagcaacaaaagaagataaatcaagtgaatcagataatagcactaaaaaagatagtgatgagtcaaatgaagtagctacaacagaaaacagtacatcaaatgataataatgataaaaattctactgaaaatgcaacatctgaaaatgataacaataaatcaaatgtatataataattcatcaagttcagataataactcaaattctcaatcaactcaaaataacacacaatcaagtaatagtgttggccaacaaactcacgtagtatctggtaatgataatttatatcgtattgcaattcaatactatggtgaaggtacagttgaaaatgtaaataaattaaaacgagctaatggcttaactagtaataatattgtaaatggtcaaaaattagttattcctcaataatatctgaatgtattaaaaaagatacacctaaaatggtgtatcttttttatgttcatttgaagataagtaaataataatgtaaatatttttatttagaaatatatcagtaaactgatataatatgttagtgattaaaggaggccattaaacatgcaaacaattgaaagtattattattggtggaggcccatgtggtttaagtgcagccattgagcaaaagaaaaaaggcatagaaacactagtaattgaaaaaggtaatattgtagatgccatttatcattatcctacgcatcaaacttttttctcttctagcgataaattaagtattggcgatgtgccatttattgtagaggaaagtaaacctcgtcgtaaccaagcacttgtctattatagagaagtagtaaaatttcatcagttgaatgtacatccttttgaggaagtattaacagttaaaaaaattggaaataaatttacaattacaacaactaaagacgtgtatgaatgtaaatttttaacagttgcgactggttattacggtcaacataatactttagatgttaaaggtgcggatttatctaaggttaaacattactttaaagaagcacatccatatttcaatcaagatgttgtggttattggaggtaagaattctgcagtagatgcagctttggaattggaaaaggctggggcaaatgtgactgtattatatcgtggagatcgatattcagcagcaattaaaccttggattttaccaagttttgaatctttagttaaccatgaaaaaatcgatatggaatttgatacaaatgttactgaaatcactcaacattcagtaacttatgaaaaaaatggtgaaacagtaacaataccaaatgactttgtttttgcaatgattggttatcatccagactatgagtttttacaatctattggtatagatattcatactaatgaatttggaacagctccaatttataacaaagaaacgtatgaaacaaatgtggaaaactgttatattgctggtgttatagcagctggtaatgataataattcaattttcattgaaaacggtaaataccatggtggcattatcgctcaaagtattttaagaaaaaaacaaactccactagaaagttaaatttcatttattttaattaaaagagagaaacaatgagtgcatcatcattgtttctctcttttttaagtttcaaagtattctttcaattccttgtgattcatatgattacttaaaccaattaaaagttttaatcttgctttagggccatttaatccgttagaaaaaataagtccctcttcagctaatcgaaaacctccaccttcataatcatatactggacttacaatgccattaaatgagcgagacacaagtacgataggaatatcttttttgacacacgattcaataccttttaaacaacttgggggtaagttaccttggcctaacgcttcaataattataccttgaacattttgttgagcataaaattctaaaacatccttagtcatccccatatacgctttaattaatggcacatttaaactctcatctattcttggaaatactgtttgtcgatatggacgattatagaattgaacacgatctttagttaagatacctaaagggccttgattaggactctgaaaggtattgatattcgaagtatgtgttttagtaacatttctcgcagtatgtatttcgtcattaaatacgaccatcacgcctttatcagaagcttctaatgaagttgcaactctaattgctgaaataaaattatatagcccatctgaaccaatctcgtttgatgaacgcatcgcacctgttataacaataggttgacttatatcgattgttaaatcgagcaaataagctgtttcttctaacgtatctgtgccatgtgtaatcacacatccatcataatgattcttagaaaattccttaataatgatgtcttttaactttattacatgagaaagtgtgatatgtggtgatgggacattaaaaggacttatttcatatacatttgcatattgacctatgatgtttttatgtaatgaaataggattgatgtcatttgtaacgacctgattgagttgattttgagacatactaattgttccacctgtatgaataacaagtatttttttcattaaactcctcctatttttaaaatatatatttatgataaaataatacagataaaacaacaagaaaggaaaaatgttatgaatccaattaatattgcattagatggtcctgctgctgctggaaaaagtacaattgcaagacaagtggctagtaaattatcaatgatttatgtcgatactggtgcaatgtatcgtgcaataacgtataaatatttaaagcaagatgctcctgaagattttcaaaatttaattaatcatacttctttagaattaacttacaatccatcaaaaggacaacgaattattttagataacgaggatgtgacagactatctaagagaaaatgatgtcacgcaacatgtttcatatgttgcatcaaaagaacctgtacgcacatacgccgtacaaaaacaaaaagaattagcaataaaaaaaggaattgttatggacggtagagatattggtaccgtcgttcttccagatgctgagttaaaagtatatatgattgcctctgtagatgaaagagctgaaagaagacaaaaagagaatgaattacgtggcatttcttccactttaaatcaattaaaaaaagaaattgaagaaagagatcattacgatatgaatcgtgatatttcacctttaagaaaagcggaagatgctataacagtggatacaacgagtaaaactatagaagaagtaactgaagaaatattaaaattagtagagaatctgtaatttttgtacatagctatttaatttaattcgtcaaatgactaaaatataagcgaattattttaaatagctattttagttatatataattaattatggaaatataaacaataaattttcttaatcttatattcaatcataagtttcgatttttattgatattaataaatatattttttctattgctcaatattaaataattttaaaaaatgatatatttttttaaaacttatgaaactaaaggggtatttcttgacaattccttgtgtttataagatgttatagttatgtagtgtataaggaggcaaacatgatgactgaagaattcaatgaatcaatgattaatgatattaaagaaggtgacaaagtcactgcaaaagttcaacaagttgaagataaacaagtagtagttcatattgatggggctaaatataatggaattattccaattagccaactttcaactcatcacattgaaaatccaagtgagattatttcagaaggtgatgaaattgaagcatatgtaaccaaaattgaaattgacgaagaaaatgaatcaggcgcttacattttatcaaaacgtcaacttgaaaccgaaaaatcatatgaatatttacaagaaaagcttgataatgacgaagtaatcgaagctaaagttactgaagtagttaaaggtggcttagttgtggatgtgggccaaagaggattcgttcctgcgtcactcatttcaactgatttcattgaagatttctctgtatttgaaggacaaacaattcgtcttaaagtagaagaattagatcctgaaaataatagagtcattttaagccgtaaagcagttgaacaagctgaaaatgacgttaaaaaagcatcgttattagattcacttaatgaaggggacgttatcaaaggaaaagttgctcgtcttactaactttggtgcttttgtagatattggtggcgttgatggattagttcacgtatcagaattatcacatgagcatgttcaatctcctgaagacgtggtaagcgttggacaagaagtggacgttaaagttaaatctgttgaaaaagattctgagcgtatttctttatctattaaagatactttaccaactccattcgaaaatattaaaggtaaattccacgaaaacgacgttatcgaaggtaaagtaattcgcttggctaactttggtgcttttgtggaaattgcttctggtgttcaaggacttgtacacatttcagaaattgctcataaacatattggtacaccaagtgaagtgttagaaccaggacaacaagtgagcgttaaaattttaggtattgatgaagaaaatgagcgtatttctttatctattaaagctacattaccaaatgaagatgtgattgaaagtgacgaagctacaactcaatcatatttatctaatgaaacagatgaagacaatccaacattaggtgacgtttttggtgataaatttaaaaacttaaaattctaatattaaatattttattatttaatttaatgatgagagcaagaaaagatattcaaatagaattctttcttgctcttttttatttatctttactcactatctatcgtatgacaatatatacttgtttttaaatcatcattgcatatgataaaattatagagattttagaaagagaggaagttagcttatgactaaacctattgtagcaattgtaggtagacctaatgtgggtaagtctacaatttttaatagagtagtaggtgaacgtgtatcaattgttgaagatactccaggtgttacgcgtgatcgtatttattcttcaggcgaatggttaacacatgaatttaatatcattgatactggaggcatcgaaatcggaaatgcacctttccaaacacaaataagagctcaagcagaaatcgctattgatgaagcagacgtaattatctttatggtaaatgtaagggaaggtctcactcaaagtgatgaaatggtagctcaattactttataaatcaaaaaaacctgttgttttagcagtaaacaaagtagataatcctgaaatgagaagtgatatttttgatttttactctttaggttttggcgatccttatccaatttctggttcacatggtttaggtctaggtgatttattagatgaagtcgttaaacattttaaagaagaagatagtgatccatatgatgatgacactattcgtttatctattattggtcgtccaaatgtgggcaaatctagtttagtaaatgccattttaggtgaagaacgtgttattgtatcaaatgtagcaggtacaactcgagatgctgtagatactgagtatagctatgatggacaagattatgtgttaatagatacagcaggtatgagaaaaaaaggtaaagtatatgaatcaactgagaaatactctgtattaagagctttaaaagcaattgagcgttcaaatgtggtgttattagttattgatgccgaagaaggaattattgaacaagataagcgtgttgctggatatgctcatgaagaaggaaaagcaatggtgattgtcgtaaataaatgggatgctgtagaaaaagatactaataccatgaaaaaatttgctgacgatgtacgtaatcaatttcaatttttagattatgcacctatcgctttcgtatcggcaaaagagcgactacgattaaaaacacttttcccttatattagagaagcaagtgaaaatcacaaaaaacgtgttcaaagctcaacacttaacgaagtagtaacagatgctatttcaatgaatcctacacctacagataaaggtagacgtttaaatgtcttctatactactcaagtggctattgaaccaccaacatttgttgtatttgtaaatgatgttgagttaatgcatttttcttataaacgctatctcgaaaatcaaattagagatgcatttggttttgaaggaacgcctattcatatcatccctagaagaagaaactaagaggagagattaagatgactaagattacggtttttggtacaggaagttttggtactgcattagcaaatgttttagcagagaatggccattcagttttaatgtgggggaaaaatgaaaatactgtagatgaaatcaatcaatctcatcaaaataaacggtacttgaaagacgtaacattaaatgaaacgattaaagcaacaagtcaattagaacaagcagttaatttttcagatatatttttaattgctttacctacaaaagcaattaggaatgttgtgactgaaattgatcaacatattaaaactaaaaaaacgtttattcacgttgcaaaaggtattgaaaatgaaacatttaaacgtgtatcagaaatgattgaagattcagtatctaagaaccataaaaatggcgtaggggtactatctggaccaagtcatgctgaagaagttgtaattaaacaacccacaactgttgcagcttcgtcaaaagatgaacacataagtaaacttattcaagatttattcatgaatgattacttaagagtatatactaataatgatttgataggagtagaactaggtggtgcacttaaaaacattattgctgtagcaagtggtattgttgctggaatgggttatggtgataatgctaaagcggctttaatgacaagaggtttagctgagattagtcgactaggtgaaaagctaggggctgatcctatgacttttctaggtcttggtggcattggtgatttaattgtaacgtgtacgtctactcattcaagaaattatactttgggatataaattaggaaaaggtaaaacgactgaagaagcacttaacgaaatgaatatggttgttgagggaatttacacaacaaattcagtatatcatttagcgaagtctcaaaatgttgatatgccaataaccaatgctttatacaaagtattatttgaagataaaccagtgaaagatagcgtgaaagatttaatggggcgagataaaaaagctgaataaagtgtaattttgctatttaacacaaatattttataaaattattcacgaaatactgacaattcaacgttttaagtatataaatcgttgcggtaaagggaattattgtgttaaagtcataccataatgatataaatttatcattatcattcatccggaggtgaactcataatgaataaaactgacttaatcaatgcggttgcagaacaagctgatttaactaaaaaagaagctggttcagcagtagatgctgttttcgaatcaattcaaaactcactttctaaaggtgaaaaagttcaattaattggtttcggaaacttcgaggtacgtgaacgtgctgcacgtaaaggacgtaaccctcaaacaggtaaagaaatcgaaattcctgcaagtaaagttccagcattcaaagctggtaaagcattaaaagatgctgtaaaataatttacttaaaaaagccctataagggctttttattttatatattgtttaattctaaatacatatgttttatttataattgtacaattcactgtgaagcgactatgaagttattttcgtcataagcactatattttatttttatgaatataatgttaatatgtatattgatactaacgtgaggtgtgaacatggaaagaacattaagcaaattaaatagacaaattactcaaaggcttaaaggaattaatgaatatgaagcaattcacattaataaaggattaagtgatgttttagatcattttaatattccagaaaatgctaaacttgcctgcctcactattgatacttcaatgaagcatctagatgatatttctaaaaataaattatctaagaaatcaattctaattggtgacttattaagtgctcatttttatactttaatatctgaaattggtgatgtatcatatcaaagactaatgagtgaagcgattatcaaatctaatgagcttaaaacttcattgcatcatcattcactcgagcgtcatgatatatataaggctgtgttagatatagaaacacttttcccttttataactatttctcattttacagatattgagatctctcaatatgaaatatttgaaaaattatttaatggggtacatcaatattatccctcttatttaagtgaatatgatgaagatgaaatcaaccaaattattaaacatataaagcaaagcgataaagagaaaagtagaggtaataattaatgactgaaaataatgcaaaaaaagaacaagttcatacggtttttcaaaatatttctaaaaaatatgatcgattgaacaatataataagcttcgaacaacataaaatatggcgtaaacatgtaatgaaagatatgaatgtgttacctggaagtaaagcacttgatgtatgttgtggtacagcagattggaccattgctttaagtagagcagtaggacctaatggagaagttacaggtttagatttcagtgaaaatatgcttgaagttggtaaagaaaaaactaaatcaatgcctaatattcacttagtgcacggcgatgctatgaatttaccatttgaagataacacattcgattatgtaaccattggtttcggtttaagaaatgtgcctgattatttagcaacattaaaagaattaaatcgcgtattgaaaccaggcggtatgattgtatgtttagaaacaagtcaaccaacattacccgtatttaaacaagtttataaactttactttaaatttgtgatgcctattttcgggaagttgtttgctaaatctaaggaagaatatgaatggttacaacaatctacattcaattttccagataaaactaaattaaagcgtttatttgaacaggctggtttcagtcatgtaaaagttcgtagctttacaggtggcgttgctgcaatgcaccttggctataaatagaaagttctactaaataaaaggtgattaatgtggcaaagttaagtatgaatagtgaaattaaaaatgttgaaaagcgtttaaaaaatgctattaaaagtaatgattctgtattacaagaagcagcatttcatttattatcttcgggtggcaaacgagtgcgtccagcatttgttcttcttagtagtcagtttggaccaaaaaaaattactgaagatacgtatcatgttgcagtagctttagaattaattcatatggcaacacttgtgcacgatgatgtgattgataaaagtgataaacgtcgtggtaaattgacgattgaaaaaaaatgggatgttactaccgctatcctaactggcaatttcttactagctttaggtttaaaacaactttctaaaattgaagatcatcgtgttcatactattatttctaacgcaattgttgatgtttgtagaggcgagctcttccaattccaagaccaatttaatagtcatcaaaatattacgaactatttgagacgtattaatagaaaaacggcgttgcttattcaactttcaacggaagttggtgcaataacatcacaagctgataatgagacgattcgaaaattaaaaatgattggtcattatattggaatgagttttcaaattgtagatgatattttagattttacaagtactgagaaaaaattaggtaaacctgtgggtagtgatctaatgaatggccatattacattaccagttttattagagatgaaaaaagacccggttttcaaaaaacaaattgctgagttatcacacctgacaaataaaaatcaatttggcccacttattgatcaaatcaagaattcaaatagtatcacacaatctcaagaagtgagcgatcactatttaaataaagcactcgacttaattgatcaattagaggaaccaaatgctcaaaatttatttagaaagcttattaaaagaatgcgatctagaaatacttaaaaatagaaaaaagttgaaagcgctttaacaacctgttagtatttagtagtagtaggttgttttctattaaatgtatttatacatattaaatcaatttttttaattagggggatttgtataatggaacgcacttttttaatgattaagccagatgcagtacaacgtaatttaataggagaaattatttctagaattgaaagaaaaggtttaaaaatagttggcggtaaatttataattccaactaaagatactgttaacgtacattatgctgaacatacagagaagccgttttttcataaacttgtttcatttttaacttctggacctgtgtttgccatggttgttgaaggagaagacgcagttgcggtatctagacatattatcggaaaaacaaatcccactgaagccgatcccggtactataagaggcgattatggtttaacagtagggagaaatattattcacggatcagactctgtagaatctgctgaaagagaaatcaatttatggtttaatgatgatgaaatatatagctacgaagctattagggaaaattggctttatgaagaataattttttaaaattggaataaactggaatttattttccattcaaccattgactgccaacatgttagaaagtacctaagacaacagttgtcttaggtacttttttatatgaaattatttgaattttcaaacaccaattattctacactagttatgtaatttcgttgaatatgatatgataacaaataatacataatactatttaaagtggtaaaggaaaggagctattattcatgagatatttaacttcaggagaatcccatggtccacaactaacagtaattattgaaggtgttccagctaacttagaaatgagagctgaggagataaataaagaaatgtttaagcgtcaaggtggctacggtagaggacgtcgaatgcaaattgaaaaagatgcagtagaaattgtttctggtgtaagaaatggctttactttaggtagtccaattacaattgtagttaaaaatgatgattttactcattggagaaatattatgggtattgaaccaattagtgacgaagcacgagaaaatatgaaacgtacaattacaaagccaagacctggtcatgcagacttaattggcggtatgaaatataatcatcgtgatttgagaaatgtacttgaacgttcttctgcaagagaaacagctgcacgcgtagctgtaggagcagtgtccaaaattttactttctcaactagacattcatatgtatagtcgtgttgtagaaattggtggaattaaagatgaagggttatacgatacagaaacatttaaacaaaatatcgataaaaatgatgtacgtgtgattgatgaatcgattgctcaaaaaatgagagataaaattgatgaagctaaaaaggaaggcgactctataggtggcgtagttcaagttatggttgaaaatatgccagttgcagtaggtagctacgtgcattatgatcgtaaactcgatggacgtattgcgcaaggtgttgtaagtattaatgccttcaaaggtgtcagctttggtgaagggtttaaagctgctgaaaaacctggaagcgaaattcaagatgaaattttatatcattctgaaagaggttattatagaggatctaatcatttaggtggctttgaaggtggaatgactaatggtatgcctatcattgtaaatggcgttatgaaacctattccaactttatataaacctttaaattctgtagatattaatactaaagaagattttaaagcaactatagaacgttcagatagttgtgcagttccagcagcaagtgttgtttgcgagcatgtcgttgcttttgaagttgctaaagctcttttagaagaattccaatctaatcatatcgatcaacttaaagaacaaattgaagaacgtagaaagttaaatatagaattttaaacatctttttaattaacctttagaaatgaggtatatcatgcaattacaaaccacatatcacagtaataattatccaattattgtagaacatcatgcatttaaatatttatccgaatatattcaagattacgataaagtattcttaattatagatgaatttgttgattttaattttagagataaatttgaaacaatatgtcacaattcaaacattcaaaaagttatcgttcctgccggcgaaaaaatgaaaacgtttaatcattatcaagctatcatggaacaactactaggaatgaatcttactcgtaatacttgtttagttgctataggtggtggagccacaggagattttacaggattcttagcttctactttattaagaggtgttgattttatacaagtacctacaacaatattagcgcatgactcaagtgtaggaggtaaggttggaataaattcttcccatggtaaaaatcttataggcgcattttatagacctaaagcagtcatatatgatttggattttttaaaaactttaccttatcatgaaattttaagtggatacgctgaggtgtataagcatgctttattgactggcacagttgctacagaagatattgaaaaacacttttcagatagaaaaacacttgaatcacttaaagatatggatcaatttatttttaagggcataaaaacaaaactaaacattattataaaagatgaaaaagaaagtaatgttagaaaatatttaaatttaggtcatacctttggacatgcagtagaatataagtataaaatacctcatggtcatgccattatgattgggatgatttatcaatttattgtggcaaatcatcttcttggcacacaatttgatattcaacattatattaattatatgaatcaattaaattatccgctggatttaatccagcagattgattttgaagaaatgtatcaatatatgttatcagataaaaagaataatggtgaaggtattcaaatggttctactcgagaaattaggcaaacctaatgtatatcatgtagaaaaaaatatattgaagcaatcatttaaacaactacaattattagtagagtaggtgaaatactgtgacaacaagtcaaataatagatattcatggtccattaaagggtgagatagaagtacccggagataaatctatgacgcatagagcaattatgctatcgtcactcgctaaaggtaaatcaattattgaacaaccgcttctaggtgaagattgtttacgtacgattgaaatttttaaactcttaggtgtggagattgaaattgaagaacatcgtcttattgttaattctccaggatatcaacatttcaatataccacatcaaacgttatatactggaaattctggtacaacaacgcgcttacttgctggtcttttaagtggattgggcatagagtgtgttttatctggagatgcatcgataggaaaacgacctatgaatcgtgttttaagacctttaaaattaatgaatgcaaatattaacggtattgaaaataactatacaccacttattattaagccttcagccattaatggcatcaattatcaaatggaagtcgcaagtgctcaagttaaaagtgcaattttgtttgcaagtctattttcaaaagatgcatcacaaattacagaattagacataagtagaaatcatactgaaacgatgtttaaacattatcaaattccaatacaagtaaatcaaaaagtgattacaacatctccttatgctataagcaatattcaacctaaagactttgtagtaccaggagatatttcttcagctgctttctttattgtagctgctttgatttctccgggaagtgatattacaattcataatgttggcatcaatcctacacgttcaggtattatagatatcgttgaacaaatgaatggtaacattgagttatttaatgttacagagtcttcagaaccaactgcgtcgattagagttcagtatacgaacaacttgaaacccatcacaattgaaggagatttaattcctaaagcaattgatgaattgccaattattgctttgttatgcactcaagcttctggtacaagtatgattaaggacgcagaggaattaaaggtaaaagaaactaatcgtattgatacaactgcagatatgcttaatttactaggttttaaattacaagctactgaggatggattaattattcatccctctaaattaactagaaatgctatagtagatagcttaactgaccacagaattggcatgatgcttgcagtcgcatctattttaagtgattcaccattaacgatacgtcagtttgatgcagtaaatgtatcattccctggtttcttgccgaaattaaagcttttagaaaatgagggataaaatattatggaagatatctataaattaatagacgatatcaatcttcaaaaattagatcatttagatacacgtgtaaatgaagcattaacttccaataatgatgatgctttatttattttaggagaaacattatataactttggattaacacctcaaggtcttgaagtgtttagaacgttatatcataagtatccagatgaaagtgaactattaatttattttatcgaagggcttatgtctgaaaatcagacagacgaagcattagaatatttaaatcaagttgaattgtcacctgaaaaattaatgttagaagccgacttatatcaacaaatcaatatgactgaagttgctattgataaattaactgaagcgcgtgaattagaacctaatgacccaattattcattttgctttagcagaattactttattttgatggacaataccttcgtgctacacgagaatatgaagttgttttagatacaggcgaatatgaaataaatggaattaatttattttcaagaatggctgattgtgcattacaaagtggaaattatagtgatgctatacagttatttgatgagattagtgaagatgaaatgatctctgatgactttttcaaaaaagctatcgcatatgaaaaaaatgatttaactcaagaagctataaaaattatgactacacttctttctaaagatccagactttattcaaggttacttttatttacaatctttatatgaaaatgaaaaaaattatccagatgcgattgaaacaggtaaagaagggttacgtcttaatcaattttataaagagctcatggtttctaccggtagtttagaaattgaacatggagatgcgaatgagggggtagaacttcttaaaaaagcacttgaagtagataatgcttaccatgaacctttacttatcttaagtgatttattccgccaagaagaagattatgaagccatcatttcactcctatcttatgtagatgaagaagatcttgaccctgtctttatgtggcacttagcacatgcatatggggaagaagaaagagatactgaagcccaacatttctatgaattggcttatccgacattgaaatctcagagtttattcttaagcgattattatttttatttaattgaaattggccaaaaagataaagctaaagtattgcttaacgagttattaatcattgatccaactaatgaaacttggaatgaagaattgagtagattgaatgactagagtgggtgttaaaattgaatgacacattagttaaaatgaaacaaagctatattgaatatgctttgtttcattatcattttaagtccagaattagtgtgtggctattaaattatttaaaagcttcaccgctaaaattaaattgtagtcattttgtaaataagaaaattaaaagtcatataacccttgaaattggcctaaaacactccaatttctctgcaattaaattaacaaaagacgatcaaacattaattaatacaaatgaaatattcaattatatagcttctaaagatatttgtattgatatattcattcactttgaatacaacgatgagcaagattggcgattaaatgagctcataattcaacaattaatatattctgatcaatatcttgcatatcttaataatatatatcacttaaatcttgatctaaataaaaagtattcattaatcgaacaattagaacatcatatcgatgtaagtttacaaatgaaagatcaacaacgcttttatcaattatcacaaattttgagtgtattaactcatcactcatagatcaaaattaaaggaattataacttatgcctactttaagacaactatgggaattatcattatatcaacgttccatactcgtaatattgcttatatgtaatgttttaggtaccatttatggttttatatggtatggtgatcaattacttaagacacaatggcattatctaatttttgtaccagatagtcctattgcatcgctatttttatgtatatcaatttgtttaataattttaaataaacaaaatagtattattgaaggactagcatttgtaactttatttaaatatggtttatgggctgtcattatgaattttataatgataattaataatgatgatataactattatgaatgtatttttaattattagtcatggaattatggtacttgaaagtatctatttttatccacgattcaacatctctatgctcagtttgtttatctctatgatatgggtatttaacaatgattatgtagattatatattaaagaaatatccttattatgattttatacagcaacacgttcatttagttgcttttatcgcgctatggctaagtattatatcacttatgctttattataattttaataaattaataaaggttaaattatttgataaaaaaatcgatagtcagtagaatatgattaaaggagagtgaaattgattgtctatagtgtcttatattatatatatcgtcattattatgctcattccaatgtgggctcaacacaaagtaaaatcaaattatgaaaaatattcacaggtaagatcaacaagtggtaaaactggtcgtgaagtagcagaagaaattcttcatgctaatggaatttatgatgtagatgtagttaagggcgaaggctttttaacagaccactatgatccaaataagaaagtagtttgtttatctcctgcaaactttgaccgtccttcagtagctggtacagctattgcggcacacgaagttggacacgctattcaacaccaacaaggttatgcatttttacgttttagaactgctttagtaccgttagcaaatattggtagttcattaagctacatcgttattatggctggtatctttttaacagcattaggtagcgcttttggctcaactgcattatggattggtgctgggttaatgtcattagcagttttattctcaatcgtgacattaccagttgaatttgatgcaagctcaagagctatgaaacaaattactgcacttaatattgtgaatgaaaaagaatataaacatgcgagaaaggtattatcagcagcagctatgacttatgtagcagcaacagctacagctgtagccgaacttgttagaattattttactggcacgtgcaaatgataactaaaatacctttataaactaacttaagtttaaatcttgtataataacatttaagattttcaaatagttataccgagcgaaatatgaattcaaaaatgaattctgtttcgctcttttttataccccatagaatagaattgataaaatgcattaacaagtaatttgagatatacttagtaagaaacggaaaaaaggagaatgatgatgaaatctttaaatcaaatgcaaaaagaagtagatgactatattagtcaatttaaagcgggttatttttctccattagctaatttagcccgtctaacagaagaagtgggcgaacttgcaagagaaatcaatcattattacggtgaaaagcaaaagaaaccaacggaagaagaaaactctgttaaagctgaattaggagataatttatttgttttactttgcattgctaattcccttggtattgatatgacagaaagttttaatgatacaatggagaaatttaatactagagataaaaaccgatttgaacgtaaataatggatagaaaggtggttattttatgaaaataggtattacatgttatccgtcaatgggtggctcaggtatcatagcaactgaattaggtattaaaatggcagaaaggggacatgaagttcactttattacgtcaaatattccttttagaattcgtaagccgttgcctaacattactatccatcaagtcgaagtaaatcaatatgcagtatttcaatatccaccgtatgatattacattgagcacaaaaatatctgaagtcattaaagagtatgatttggatatcttgcatatgcattatgctgtaccacatgctgtatgtggtattttagcacgtcaaatggctggaaaagatataaaaattatgacaacattacatggtactgatatcacagtgttaggctacgaccattcacttaaaggtgctattaaatttggcattgaacaaagtgacctcgtgactagtgtcagtcagtcattagctaaacaaacacaatcaattattgaaacagataaagagattattcctatttataattttgttcgagaaaaagagtttcctacacaacatgaaaatcaatataaagagctttacgatataaagcctgaggaaaaagttcttatacatgtatcaaactttagaaaagtcaaacgtattgacactattttagaaactttcgctaaagtccataaacatataccaagtaagttgatcttattaggtgatggcccagaacttttagatatgcgtaaaatagcaagatcattacatatcgaagatgatgtattatttttaggtaaacaagctcaagttagtaaattttatcaaatggctgatttagttttactgttaagtgaaaaagaaagttttggtcttacactattagaggcaatgactacgggagtagtacctataggttcaaatgctggaggtattaaagaagtcatcaaacatggtgaaacaggttatattgtagatgtaggagatagtgaacaagcaagtgattatgcactaaaattattaacagatgagcaactctatcaaagattacaaagtaatatgcttaaagatattaaacaacgatttagttctgaacttatcgtcgatcaatatgaatattactataaaaaaatgttgaattaaaaaaagaggattaatatgggtaatgaattatttgaaaaagctctgccaattcttaatcaaatagaaacacatcatttcgaagcttattttgtaggcggggcagtcagagattacattatgcatcgtacaattcatgatattgatatcactacaagtgcgatgccagatgaaattgaagatatatttgaacacactattccaattggaaaagagcatggaacaatcaatgttgttttcaacaatgaaaattacgaagtgacgacatttagatcagaaggtgattatttagatcaccgtcgtccaagtgaagttcattttgtgagaaatctctatgaagatgtacaacgtagagatttcactatcaatgctattgctatggataaaaattataaaatatttgattactttggtggtcaaaaggatatacaatcaaaattaatacgtacagtagggaatccaagtgaacgatttaaagaagatgcattaagaattattcgtggacttagatttcagtcacaacttacatttgatattcatactgaaacctttgaagcaatgcaattaacttgttcggacattgaatatttatcaatcgaacgaattgttgtagaatttaaaaaattaatcttaggaagtaatgttaaacagagttatcataatttattatctttaaaactttttaatcatattccattttttaatgaattagatatgacatgtgtttacatcaatgaacctcttgaatttgaacaatggttagccattttacttataaaaaatgatacgcttccttctttaaagcaattaaaaattagtaataaagaaaaatcagatatacatacatacattgatattattgaaacattacctcaaattacttctaaagatgctttaaaattatttgtttatgattatagtgactattatatcttaaaggttttaaatatttattctgtacttcaaaataatcaaattcctaccgcttcagaacttattatcaattctctttctattaaacaagtcgttcaacacctccaattacatgaacgtaaagaaatggatgtgaatggaaaagatttacttgaccattttaataaaaatggtggcccttggttaaaaaatgtattgagagaaatagaatgtgcgatagttactgataaaatcaaaaataacaaagaagaaattttgaaatgggtgaatgaaaatgtcaaaatatagtcaagatgtcgttaaaatgttatatgagcatcaatcagaatatatttctggtcaatacattgcgaatcagcttaatatatcgagagctgctgtaaaaaaagtaattgatcaattaaaagcagatggatgtgatattgactcaattaatcataaaggacataagcttaatgcatcgccaaatcgttggtatagaggcattatcaataaagtactagagtctaatcatttagtatccaaaattgaagtatatgatagtgttgaatctactcaaactattgctaaacaaagccttgttgataatcaatacaccatgttaattttaagtgatgagcaaacaaaaggtcgtggtcgtttcaatcgtaattggtcttcttcaaaaggaaaagggttatggatgtctgttgttttaagacctaatgtctcatttgcaatgattccaaaatttaatctttttatagctttaggaattagagatgctatccaagcattttctaaagacaaagtagagattaaatggccaaatgatatttatattaatgataaaaaagtatgtggatttttaacagaaatggtagcaaatgctgatgcagttgaggctataatatgtggtattggtattaatttaaaccatcaagaagaagatttttctgatattatacgtcatcgtgctacaagcattcgcttgcactattcagaagaaatcaatcgatatcaatttttaaaacgtttaattgaggaaattgaaaagcgttaccatcaatttcttaattcttcatttgaaacgattagagatgaatacattcgtacatctaatatttggcatcgtaagttaacatttactgaaagtggagaacaatttataggtgaagctattgatattgataatgatggctttttaattgtcaaagatgaagataatcagatgagacgactgataagcgcagatatagatatataagcatacggatagaattaggagagatagatatggcatatacaagttttgcggtagtagatttagaaacaaccggaaaccaacttgaacatgatgaaattatacaaattggtattacatttgtacgtgataataaaatatcaggaacttatcattcaatgattcgtactgatttggaaatcccaccatttatccaagctttgacttctatcgaagaaactatgctagaacaagcaccgtatttttatgaaattgctgatgacatatacgaacaactcaaagattgtatatttgtagcacacaatgttgactttgatttaaatttcattaaaaaggcatttgaaaaaagtaatattcattttaaacctaaaaaggtgcttgataccctggaattatttaaaattgcatttcctactgaaaaaagttaccaattaagtgaattagcaaatgctcataatatacctctgacaaatgcacatcgagcagatgaggatgcaacaacaacggcctatttaatgattaaagcttttaaaaagtttgagtcattacctatagataccttaaagcaattatattatttaagtaagcatttaaaatatgatttatttaacattttatttgaaatggtcagacaacatcataatcatgatatagattatcagtatgctcaatttgaacagattatctataaaaaacaacaagacttaaaagtaccacaaattgaatttaaaggttcattaaaagatttatatctagaagttacaacagcacttgaacttacttatcgcccacaacaactctatttgtcagaaattattttagagcagttaatgcataatgataaggcacttattgaagcacctttaggaagtggtaaatcactagcatacttattagctgcattgatgtataacattgaaacaggcaaacatgtaatgatttcaacaaacacgaaattacttcaacatcaattacttcaaaaagatattcctagtattaatcgcgcgctagatttcaaaattaatgctgcacttatcaaaagtaaaacagactatatttcactaggattgataagtcaaattttaaaagatgatacagctaactatgaagtgaatattttaaaaatgcaattacttatatggatattagaaacaaatactggagacatacaagagttaaatttaaaaggtggtcagaaaatgtattttgaccaaaaattagaaacttatgttccagtaaggcacgatattcattactataattatataaaacgtaatgctcaaaatattcaaattggtattactaatcatgcgcatcttattcattcagatcaagagaattcaatctatcagttatttgatgattgtatcattgatgaagcacatcgtttacctgattatgctcttaatcaagtgaccaatgaattaaactattctgatatcaaatatcagttaggtttaatagggaaaaatgaaaatgaaaagcttcttaaattagtagatcatttagagcaacaacgtattttagaacgattagatattccacctattgacgtgtttggtctaaaatctaatatttctgatttacacgaactaaatgaaaccctatttaatcatatttttgatattgttcaacactcagacgtacatgatgatgatgtacatcgatatcattatgtattcgactttgatgctacacgtattctaaaagatttgcatgcaattgtagacaaaatcaacaaaactttagaattttttaatggtattaaccataaaacaatcaaatctatacgtaagcaattactttacattaacgataattacagacatatagaactaagtttaaaacaaaatcatactgccttcatatctatcaaaaatttgaatcaaaaatcgaccatacgtctaattgtaaaagattatgaagtccgtgatattttaacaaagcaagtgctcgagaaatttaaatcattaacatttatttcaggcacacttacattcaaccattcgtttgaggcatttaaaaactggtttaaagaagatgtagaatttaatacttatgaagtacagtcatcacttcaaaatcataaatcaacaaatatttacattccaagcgatgttgtttcttatgattttaaaaatacagaagattatgtagcatctattgtagactatattcaagagtacgtcactgtaacacaatctaaatgtctcgtacttttcacaagttatcgaatgatgcatatggtacaagagctattaaatgaattaccgatatttgacgattatgttattttgacccaacaacaaaatcaaaactataaaattgttcaacaatttaatcattttgataaagctattttgttaggtacatcaacattctttgaaggatttgactatcaatctaatggtattaaatgtgtgatgattgctaaattaccattcatgaataaatataatacaaagcattggttaatggattcagaatttgaatctacatttaaagattatgtcttacctgatgctgtaacgcgttttagacaaggtctaggtagattgattcgtaacgaagatgacaaggggctcattgtttcctttgacgatcgtttaacaaatagtaactataagcgtttttttgaacaatcgttagaatcttattcccaaaaaaaagggaatattcaacaatttagtaaattacttcaccgcatgcaggcgagtaaactgaaaaatagaaaaaaatagattattttaaatgatgagaacactattcaggtgctagaagttcactttctattttgataaaataaataagtattgtataaaaagaaaataaagtaggagtttgattatgaaaacaacaattaaacaagcaaaacaatacattaatcaagaagtcacaattggcgcttggttaacaaataaacgttcaagcggtaaaattgcatttttacaattacgtgatggtagtggatttatgcaaggtgttgtcgttaaatcagaagttgacgaagaaacatttaaacttgctaaagacattacacaagaatcatcattatatgtcacaggtacaattacagaagataatcgatctgatttaggctatgaaatgcaagtaaaatcaattgaagtcattcatgaagctcatgattatccaatcacacctaaaaatcatggtacagaattcttaatggatcatcgtcatttatggttaagatctaaaaagcaacatgcagtaatgaaaattagaaatgaaattattagagcaacatatgaattctttaatgaaaatggctttactaaaattgatccgcctatcttaactgcaagtgcaccagaaggtactagtgaattattccatactaaatactttgatcaagatgcatttttatctcaaagtggtcaattatatatggaagctgcagctatggcacacggacgtgttttctcatttggaccgacatttagagcggaaaaatctaaaacaagacgtcatttaattgaattctggatgattgaacctgaaatggcatttaccaatcacgaagaaagtttacaagttcaagaacaatatgtatcacatatcgtaaaatctgtattagaacattgtaaattagaattaaaagcgctagatagagatacgagcaaattagaaaaagtatctgcgccattcccacgcatctcttatgatgatgctatcaaattcttaaaagaagaaggatttgatgacattgaatggggtgaagactttggtgcgcctcatgaaacagctatagctaatcattatgatttaccagtatttattacaaactatccaactaaaattaaaccattctatatgcagcctaaccctgacaacgaagacacagttttatgtgcagatttaattgcaccagaaggttatggtgaaattattggtggttctgaacgtatcaatgatctagaattattagaacaacgtatcgatgaacatcaacttgatacagaaagttataactactatttagacttacgtcgttatggtagtgtgccacacagtggtttcggtttaggtttagaacgtacagttgcatggatttcaggcgttgaacacgtgagagaaacatcaccattcccacgtttattaaatcgtttatatccataaaaatatcacgttttataaatcatacttggggagtgagactaaatgatgttattcatgtctcactcccactttttacaataagaaagagaggggtatcatggacacacatcaacttaaaactcgtcctgttgtagttagaagggaacttttcgatcattacaatgaattaggtttaaatgaaaaagatttagtcattttgattaagttgatttatgccgctgaagtttctaataaacaaccctcaatagaatttttgcaaaaaggttcaaatatggagccgagagaaataacatcaattattcaaaatttaattcagcgtgatttacttgcactgcatgtaagtaaagatgaggaaggaaaatttactgaatatatgaatttaaatcgtttttacgaaaagttaagtgatattttaactcaagaaaaaaatgaaactacacatcatcaaacgcaacaaaactttaaggatttatttcaatatattgaacagttgttttcgagacccttatcaccatatgaaatcgaaacgctcaaccaatggattgatatagaccaacatgattacactttaatacgtgctgcattagatgaagcatatagtcatgataaattaagctttaaatatgttgatcgtattttattaaattggaagaaaaacaatgtaacaactttagaagaatctaacaaagtgagagaaaaattcaataaacctaaattaactcatactgtaaaacatatacctaaatttgactggttaaatggagagaatctagatggtaagtaagaaaaaagcattagaaatgattgacgttattgcagatatgtttcccgatgcagaatgtgaattaaaacatgataatccgtttgaattaacaatagctgtattattatctgcgcaatgtacagataatttagttaataaagtaacacgttcactttttaaaaaatataaaacacctgaagattatttaaaagtagatatagaagaattgcagaatgatataaaatccataggtttatatcgtaataaagcaaaaaatattaaaaaattatgccaatctttactcgaccagtacgatggacaagttcctcatacacataaagatttagaaagtttagctggagtcggacgaaaaacagcgaacgttgtcatgagtgtagcttttgatgagccttctttggcagtagacacacatgttgaacgtgtttcaaagcgtctaggtattaataagtggaaagataatgttaaacaagtagaagaacgtttgtgtgatattattccaaaagaaagatggagtaaaagtcatcatcaacttatcttttttggacgttatcattgtattgctcgaaaaccaaaatgtgatatttgtccattacttgaggattgtagagaagggcaaaaacgcatgaaagcaatgaaaaaggaagtctaatcaaatgattaataaatcacaatttgaatcgctagaaaatgaacttgatgtctatgctaagaaaagacaactaaattctgatttagcaaaacaatatatcgatgattattttgaactacttcttttgttttttagacaaattaatgaaatagagtctattgatttaaatcagttagaccaatatccagttgttcctatgaattttttagaacgatatcaatatatgttaaaaagaaaataccactttatggggtatagtcaaatgaaaactttgaaaaatgaacttattaaaatgaacgcttcatatcaaattagaagaaaaaatcaaaataataattaatatgaaagatagtctagagcaaagttgttctagactttttttagttaaaaaaacgaggctgggacataattcctaacaaaatagccagtaaatgagtttattataaattcatttactggcttctttatttacaatactacgtattgttggctcgctttcttaggggacagcttcagcctgtaaaaaaaaaaaaaaaaaaaaaaaaaaaaaacaaaaaaaaaaaaaaaaaaaaaaaaaaaaaaaaaaaaaaaaaaaaaaaaaaaaaaaaaaaaaaaaaaaagtatatttaatgatacggggaccaccgagaaatacacctaagccttcgtcggcagcgtcagatgtgtataagagacagttattttcactaagcgacaaatatagtattatcttactttgtttattagctattattttaggtacaattattcattttttagtagaatttattggtgactatttatataaaaaataaaaggtggacgcaaattcgttctaaaactttatgatcacattcgtgtataaaattttaatcactcaaaaatcaactaagtattttattagttaaatgctttagtttttatatttttatcttttaaaaatgtttctacttctttttgtttttttccatttacgtcttttttatattgttcattaattgaatttatttcatcaatatcttttatagatagattatctgaattagaatttttatttactttttgtatttgtgtattcaatttttttaagtactgattagcagttgttatataatctttagttttaaacactccatctttatatccatttggtaaattagtgttttgaataaagttagaaaaattactatcatttttatcattcatttcagttaatgaatttaatttttttaactcatttttatttaagttatctttattacttaaactttcaatattttcaattaaagcatgatttatatctaaatattttgaaacactctttttaatttcttttttactgatattttcattaattttactagatgaaaatacttgtttaggtattgctggtagttcatttttattagaagtttgattttttgatttttctgtagagttaccacaagcagttaatgaaaaaaataaaagagaaaccattattaacacaaaaaatttctttaaattcatttaaaattctccttttttaagcttttctttattcttaccaatctttttcaagttgttttaaaaattcttttcgattatattctaaatcttgatcgtacttttcactttgaacttctctcatatctctacttttatttaatcaattaggcgttttctctcgacttctcccttgtggctccttgcggttaggttttcggtttttcctaagagtatcgtcgctaaccacaaatgtatctcgttcactcattcattctcaccacgctttcttcgaaagttattacttaacgtaacctaagcatataaaacatgcaaaggttatttaagtaatatagtggtttggagtactggcttttctagccacatacatggtagtgtctccggcttgttgggggaacatctccaagtcccttaggattttttctcacgaaaaaatagtggctaattgctagccaccattataaaattttataaataaataataaaaaatgtaaattagatgtttaaatagaatatgattttttgttaaggtttaaatataaaaatattaggaggctaatcaagaagattacaaaatcaatcaaaatatagccaatattatttatgataatctcgaaagaaatgataatggtgaattacaaattattgataaagaatatttaaagaatgaactaagcaattctagtttagatgttacagttaatgatgttgagaactatgtgaatcaatataataaaactatgcaaggaaaaaatggtaaaaaagcgaaagaaaatttagtagcttttaaaaaagaagttgaaaaacaacaaaaaaatagtacaagtacgagtaatagagatgcttgcgatgctataactgtaactggttttgctcatactacagctacatcaagagcaatggtaacattaggagttagcggacctgttggctggggagtcgcagcaggaatgggagcgttatatgctggagaatctattgcttgtaatcatgcgtaggtgaaaagatgaaaaaattaatagataaatattttttcactataagtcaagcaactatcttatttatttttgcaattccaatgacaaacttagtgattaaaagtcttttactttatattttattatttattatcttaattggaagtacattttttattgaacgtgatttaagtaaagaatactcactacaggaaaaagcaaaaaaaatgtgcttcacattgttacctattaatatagtagttgttcttatattctttatatttatactttaatattataatgaatatataagattaaactatagcacatcaaatattaaaatatttgatgtgctatatattttgtgggagaaaaaatatgaaaaagagtaacgtaattttaataatatgtcttgtttttattttagtaggatgctcaaaaagaaaataattatttatggatactacaagtgcccttattgtaaaaaagtagaaactaatattgtgcttaaattacaaaaagattatcttgataaagataaggctgattataaatttgtaaatatggcattcttaggtaaagatgcaatcaaagaatctagagctggtcatgtagttcaaaatattgcccctaaccgttatttagaatttcaaaaattaattttttcaaaacaacctaatcatgaaaatgaatggttaactgaacaattaattgaccgacaaattgataaactcaatattagtgataaaaaagcaaaaaaaattaaaaaagactataaaactaaaaatagtcaatcttggaaagatgctcagaaagatataaaactttataaagataaaaaagttaaagaggcgccaactgtttatgtaaatggtaaaaaattgaaagatccttatagttatacagaatataaaaagtatttgaagtaattaatttaaaaaaggtaatcatattgatgaattttcaaaaatcgatattaaaaatatattagaaaaaatagctgaaattgaagaaacactatatcaaagaaatgaataagttatacaaagatactacccataatcattggttatgttaatagtttcttattcacagcttatactctttataatatagtattttaattgatatgtatttcttactataattagaaaaaaatgattaacttaattcaattacaacactccttttttaagtttatatttaaattatataagtcaattcattgaatcctataattttcattggaataaatgagcaccgttcctagattatatgattctaatatttttcgttatattgtgtgttaataaattgtaagttcaagacactttattttaatgatacaattataattaatacatattatgttttaattttttatatgtattaatattcaattttataaaggaagtgaaatatttgaaagttttagaagtaaataatttaactaaaaaaattaaaaacaaaacgattctacaaaatatttcttttagtcttaatgaaggtgaaattgtaggactagtaggagcaaatggtgccggtaaaacaacactaatgaaggtgattttaggattttctcattatcaatctggaacttatgaaatcactgaaaataaaaatgcccaatcaaatacaggtgctttaattgaaagtcctggtttatacccctttatgtcaggctacgataatcttaaattatttaatgaatctaaagataagaatgctataaatgaaatagtagataaattaaatatgaaggaatatatacataaaaaagcaaaatcatattctttaggtatgaaacaaaagttaggaattgctattgcatttttaaataatccaaagcttattattttagatgaacctatgaatggtttagatcctaaggcagtaagagatgtaagagaacttattttagaaactgctaagcaaggaacaacgtttttaatatcaagtcacattttaagtgaattagtaaaaataactgattctattttaattattaatgatggttccattattaaagaaacaactaaagaagaattaaatcaagagaatgaagacgatttggaaaatgtcttattaaatattattgataaagaaggtgaaatgtaagatgggtacattagttaaacaagaatgttttaagttatttaagaagaaatcaacatatatattacctgttattataatagtaattatgttagctttagctattttgggaaatcactattctgatgtttttaacttaaaggaaagttttaaaggtggtttttcttcattctcctgggttgtatttttaatgattattcaagcaagtacaattatttcaatggaatttcattatggaacgattaaaaatttattatacagaaattattcacgtacaagtattatagtcagtaaatttattacattatttatctattcacttattatttttctcatctttattattatttcgttattactacatttaatctttaatggagatacgagtttaactgaacactctaaaaatcatatatcactattaaactctatgttattaacagcccttggtacatttgttggaatgtggctagttatgagcttaacattactcatctcatgcattatgaaaagtcctggcgtatcaattgctgtaggtattgtgttttactttgctgtctcaattatctctggtttattaacagtagttatagataaatgggaatggttaaaatggaatcctctgaatatgatgaatattatggcgcaaattactgacaacgatacattcaaaaaaataacaaagttagaattacatgagttattcattggaaacattatctatattgttatctttcttgtattagtcgtagttgcttttaagaagaagaatgtatagttatttagttaatatattggatgttataaatttattagaaatgtaattcaaaacgaataagctatacatacgtactacttataatcataacttatgtctaaataaacaacaaaaagtaacaataacaaacttgattttagtaaaatataaatacctttaaattttttaaattattcacactaaagctaatatataagtgtctatccctatttaaaaaaacgttatttctatatagtatcaagacaagaagaaactcgtttcaaaaaaagcttcaaaaagtcccctttttcgaaaaaggggaccaaaaaaattaatactttaagattgttttctttttctattttgaatccaatatgcactacctaataaaccaacaggaatacctgctaacggagttaaaatattgctaagtataaatgtaacaacaactacaatacttacgttcttaaaatttaattctaaatttttaagatcttcccaagattgttttaatacattctttacagacatagtaaaacctcctttacacttatcttaattataacactttaaagttttaaaaatatatacaactatagttctaacaaccgttttttttattccaattgctttattgacgttgagcctcggaacccttaacaaacccaaaacttgtcgaatggtcggcttaatagctcatgctatgccgacattcgtcgatttttaccttagttttaagtaatcggtgttatagcacagatataaaaattaatactacctcaaaatgcaactaagatttaagctactagtttttttgctagtagctttttttattttatatatccaaaggtatacttaaacacctaaaaggtatgttctaaaatcaaatttacgtgtaatataatccaatatatctattttttattttaagaggatatttagactacgccgaaaacgaatgtgttcatgtatcatcattccataattttttaatatgttagaatttttcttcttttttgataacttttcacctataagtaataaagttgttattattaatccgcctactattgctgttgtcattatttataccactcttttttaattttacctttattttaatttatttctatattattttcactatcgctcggacgcataagtgttaaaacaccttctaccatacctatcaaacctggtattccagtccaacaaaatagtaaataaagaagagcatttttatttttcttaacataaaacttatgagccccgaaacctcctagaaaaaatgctaatgcagagtaaacatatttattaacttgcatgatttccacccctttaattaattgatttagagaaacattaaataatttagtgatttctaaaattgtttttaagtcgggattacttacttctctttcccaattagaaatagaatgtctcgatacgcctaacttttcggctaacttttcttgagacatgttttcactttttcttaacttttgtatttgatgtccaatttttgtttccaaattatttttctccttaaatttaagatatatttaaacacaattttttctatagatatttatgaacattagtattttttttgctgaaatatatgaacaatcgcataatatcaaggtttttctataattatacacgttttaaaatacattgtgataatacatagaatgtaccttatcaaatcatataaatgtaatctttaaaccaaaaccaatgtaacacataacatatttagttaaacttcttattactagagaatgatctttgtgtaatttcaaccgtctgctattttctcatttggttatttcttttctgttcttgctagtatttcttctttttcttatgattaacattatttcgcttttcagtttcgttcgcatagtacataaggaagtcactggcatttatagctggtaaattaatatgattagactgtttatttttgtgttcaagatgattatgtataaaagttttatataatgatataatttaactttggattatttattgttttaaagatcggagttgaaatcattgaatataaaagaatactccctaaaaatcaaagggaaatgtttaataaataattgtgatttaaaattctattcagggaagatcaatatggttattcattgattcaaattataactaataaaattattatatctgaaggtacaatctatcctttattgcgtaggcttgttaaagaaaattatttagaaagttattataagccttccaaagaaggaccttcacgaaaatattatagtatcactgtaaaaggtaacaaacgtttacatgaattaataaaagagtgggaatctttcaccgaagctataaactcatttatgaaagagaatgatatccatgaataaagaacaataccttgaaatccttaaaaaaagaatgaaaaatgttgataaagatgaaaaaaaagatattttaaatgaatatgaatctcattttattagtggctataaagacaataaagatgatactgaaattataaaaaaattaggagatccagtaaagatatcaaaagaaatcaatgctatgactgctattaacaaagtggaaaaagaaaaaaatataaaaaatatattcatagctgctttttctattatgagtcttagtatttttaatttcatttcaataatttttagctttttcgttcttttattactcttaccattgatattagcctatgttattgcaattcctattatgattgtatctccaataatattattagtaattggagtcataaatggttttgatacaattagtatgaatgatatctttgaagtaatcaaaggagtcatattaggtattatattaggatttatgggttattttgttgctaaatatttcttgaattttgtagttctatacttaaaatgggatatggctatccttaaaaaggagaagttgtaatgaaaaaattttttattttaggattattgattttttcacttgttttgacaggctgtaataatttagaaagtaaagaagatagtgaaacagataaaatagttcaaaagccaatacctaataaaatatttgatagaaaaattattaactctcggatttcagacaatgaacttaaaaaatcgataaaaatatatttagataaaaatgaagagctctcagaagctagcgaatactatgaggacaaagttgattctgaagaacctctaaataaaagtgagatcaacaaattgaaaaaaataaataatctaattaaacataatgatgaaaattttcgtgagtatattcaaaacaacaccttacctaaagattataataaagaaactttaagaataagtgagtatatatcaaattctaataaatttaatcaaaatttggatacaaaaattgatcaagcaattgacaaaagtatagatcaaaaaaaagtatcaacaaaaaacattgacgaaattaaagatgatagtaaaaaagtaaatggaaaggaacaagctaagattgaaaagtttttaaaagacaaaaatattaaaactaaagcattcaaaaaataaaaatcaagctactaattctataaagagttagtagcttgatttttatttatatctaaataatactaactgtaatagatatatttataatgtgaacttaaaaaagattatgaacattcgttttaagactctgtgagaagctctcatttgcatcgaagtaaagtttattaaaccaaatcattatcatgtttaattctataaacagtctgccttgttatatttacttctttcgcaattttactaattgcttgcccttcttttaacatttctacaactctatgataaataatacgtttttgaggatctttcgcattggccgaatataataaggggcgtcctttatacacacctttttctttcgcaacttgaataccttgtgcttgtctacgtttactttcatttcgttcttgttctgaaaccaatgctaatatttgaataattagatctttcataaatttatctaataatggattgccaatgacttcgttcatcataggtaaactagtaatcatcaattgaacttctttgtcttttaaataattaacgatattaatcacttcatcgtaattacgacctaaacgatcaatggattctactactaatcgatcccccattctcacaaagttaagtgcttcttgaaatacgggtctattttctactgactttcccgattgtttctctgtaaatattttctctacgccaaatgttttcaaattatctagctgtctctctaaattctgatccaccgaagatactcttgcataacctataatcattcattttcactccgtaattaatatacaccctaatcatacgttctagttgctataaattcaataacttattttgtatgattagggtgtacctataacctacaatatctcgcaattttatatcgatgttattttatgaaaatttaacttagttcttttttatgataaattaagtttagatttataaaaaattttaataacttaaaaggagattatcatatgaatgttttaacagtagaacatttaaccaaaaagataggtaaaaaaactattcttgaagatgtttcattaaagttagatcggggtcaaattgctggtcttgtaggagctaatggagcaggtaaaacaactttaatgaaagttatattgggttattcaagctatcaaaaaggacaatttgatgttattgaaaataaacataaaaaaagtaatattggcgcattaattgaaagtccaggaatatatccattcatgtcaggctatgacaatctaaagcttttaaatgaatctaaaaattctaatgacattgataccattgtctcacaacttaaaatgaatgagtatatacataataaagcaaaaacatactcccttggtatgaaacaaaaattaggtatcgcaatagctttcttgaatcaacctcaattaattattttagacgaacctatgaatgggttggatcctaaagctgtacgggatgttagagaacttatcattaaaaaagcacaagagggcgttacttttttaatttctagtcatatcttaagtgaattagtaaaaatcaccaattctatctttattatcaataaagggaaaattgtaacagaaactacagaagaagaattaaataaatacgaggataatgatttagaaaatgtattattagatattatagataaggaggaacaatcataaaatgagtacgctaatcaaacaagagtgtttcaagttatttaaaaagaaatcaacatatattatccctattattattataatattaatgcttgctcaagcagtagtttctaaaaattatgatgacgttttttctccaaaattagctatttcatcagcatttagtggattttcatggttaatcttcttattaatcattcaagcaagtacaatcatttcaatggaattttatcatggtacaattaaaaatctgctttaccgtaaatatacaagatcaagtatcattattagtaaaatcgtaaccttaattattttttcgttaatttattttattattacaatagctatagctattgttttatgggctattttctttaacgatattaatttacttgagagtaaaggtgatgaactatcactattaagtaaaatgttattaactggattaggtacatttattggaacttggttagttttaagcatcactttattaatctcatgtgcaatgaaaagtccaggtgtttctattgcagtcggcattgtcttttattttgctacttctattttatctggtttattaacaattgttattgataaatgggaatggttaaaatggaatccaattaacatgatgaatatcatggttcaaattattgataaaagttttaaagaaatcacaaaattagaattacatgaattatttattggtaatattgtttatatatttattttcttagttcttgttgtatttgtcttcaaaaagaaaaatatctaaataagttcaatgtatcttgtgattaataaatactatattaaccccctcactattattaatatgagggggttagaatgtattcaaatagtacaaaagtaaatttaatataattaattatattaaatttacttttgtaaaaaacagataactaaaaaatatagtcacctgttttttgaattcaataataattgaaagatgttataacgttcaaaatagtagaatatgaaagcacatcttaaagtatttttaattttaatgtgaatactatcttcttcagtattgtcgaaaaggaggtaatattattttttacatacttttcttgttagtactaaatacatttaaagtatctgcatgaggataactccatttccagtctttattattaaaacgttcttctatatattgctgttgtgttgtactaaattcttcattggatattatataataatttgctgtatttattgtagcctgatttaaatatctagttttttcaggtgtcagtattacttgtaaggcttttgaactattaattacatcatgttgaaattctacgcatatttttggtgcaatgggtaacattatttgggcccaattatgagtacctattattggattatcgcttgttagcaaattttccatacttcttgctatatggaaattcatagtatctggttttctaaaactttttaataatctttctaacctatcaccttgtttaaaaacccaattaaatctttttattttttctttatttttttctatttcttttaaatctataggtacttttcttggtttgtaagaaaatatattttcaattaaagtaacaaaattaattcttcccatatcagtacgtaaatattgcaaccacaaatattgaaacaactcttgttgatcttcttcagaaactgaaaaatcacttgaattaatattctttataatgtgatctataataggttctattctcgattcataaattcctaatttatgctctaaaatgttatcaactttatcagaactttcgtacgtgtaattagttgcacatactttttcataattcataaaaacttttttattagactgtcgtatataaacatggaattttttattatcattcgcaaaatgttttaaaagacatcttggataataatgttgtttttttgtaatcatagtagcacctcttatttatcaatatttcattttattatataagaaaagagagaagcaccaagtcaatttttaatttgttgacgagattagatatttatagacgaatgcacaagtactatcaatttatttatgtttaaggagctgacaaaaaattttttcaaccttcttttagtattctttacttattgggattttatcagtattagataaacattttttacgttgttttaataattcgattttatcggattgtctttttatcaaattattaattttgttaaagaaattttctattttttattgttcttcaattgatagtggtattgtgatatatagactttttaatgttttttggcttactccttttgatattgctcctctagataatcttaataattcattataaactttttgttatttaataatgaagctaaaaaatcattggttattttttgttagtattaaatgctatagttctttggcttaatatgtaaactctgttatctggaacttgcgctacatttcccataggtgcttcagttataaataatatttgtcctttttgtaattcatttttattcatccattttttatataattttttatctccataattttttaatattcacatgaacactaaaaaagccgatgtagcggctttttatttttttaatatgttaggattttttcttcttttttgataccttttcacctataagtaataaagttgttattattaatccgcctattattgctgtcgtcattatttataccacccttttttaatcttttatctgtacgatgttttaaatccacctaaatgtcatgctctatttttagcaatattcatagctttaacaactagataaacagcatttataaaagtcaaaatagtgtatggaattaaaatatataaattttctgattgaactaaaaaagttaacccaactaaaaataaaatatttaaaacagtagacataataaaagtcatatcgaactcattttttttactcaaaatatctcctccttttttaatttcacctttattttaatttatttctatattattttcactatcactcggacgcataagtgttaaaacaccttctaccatacctatcacacctggtattccagtccaacaaaatagtaaataaagaagagactttttatttttcttaacataaaacttatgcgccccgaaacctcctataaaaaatgctaatgcagagtaaacatatttattaacttgcatgatttccactcctttaattaattgatttatacacagcaccttcatcttgaagtttttttaacgactcagtgttagttgaactgttaccttgtgcatttacacttcctgtagttaaaactgcttaaaaaacttttataacaatttattgttaaaagtaatataagcctattagtattgatgtattcgcaattttttcatttttataatatgttataagtattaatgaaggaggaactgaatatgttaataactataataagctggataattacatttttaatacttgtagctattggctctttaataatgaaatttaaaaacaaaaaatgaagccctttaatttattattaagttccaagactatatatattggatcattttttcagttattatattgtcattttttcttaagttaatactttatgatgatataaactaccctttgtagttatatttttagttgatataattaatcttaaaaacgagctttaataagaggattactaaataagtttaaagcttaaatcattagaacaatttagacattaagtaattctaatatttaaagaaataacgaatactttgaatcatgataaaatatttattaaatacatttttgcattcctctattaaccagtgttataatttgattaacaaatagtgtactaacatgataaacaccgagcccgataactactgcgaatagttatcgggctcttttggtgtattagctatatgtcgtcgctaaattacttttcacgattattcagccaatgagaaaataacgtgagtataactcctactatgataggagctataatagttacaaatagtgtactgaacatgatgtcacctccttccatgctaaatacagcacagaagtgaacgacgacctttgtattatatcatttctaataattgtgttacagatgccttccgataagtcattctatgtctaaataaacatcaaaaactaacaataacagctttgattttagtaaaatatagatatcttcaaattttttaaatcattcaagttaatatataagtatctatccctatttaaaaaaagaacattcttcctatatagtatcaatataagaagaaactcgtttcaaaaaccacaaaaagtgaggtcattttatgtttcttgaaaaattaaagtgcagtaattgtgataaagaaatcgacaaaaacgaaaatataacaatacacacaaattcaaaaaatcttaacggaataacaaatctaaaaagttgggcaaaaaatcaaaaagtactatgtgaaaaatgctcgaaataaaaattattgctttattgatgttgagtctcggaacccttaacaaacccaaaacttgtcgaatgttctgcttaatagctcacgttatgccgacattcgtctgcaagtttagttaagggttcttctcaacgcacaataaattttctcagtataaatacgtgtctaattttcatttttatctaactttctaccaagtaaaagtccaataaccacgcctaaaaatccccctaaaggacctgcaaaaacaaaaagaatagatgccaaaatcataggttgtgaaaaagtatttgaattattttttaaaaaatcaatcatcagaagtcctcctttttaataaaaactatcataggagttatcaaattttaaataccctatttacaattttaaaatactttttaaagtgtttaggtgttctttatagatttttaatttaaagactcataaaacgcaaatatgaactaaatttaacaatcggtatgattttgacttacaaaactgctttgatttatttctatatgatattaaaataaaacattatatttataattttggaataaaagagctacgaaaaatccaaaacttgaaatcaatttcaagttatttgtaatcaatatactcatcaatgcttcttcaaatatattcttctatatgtcgctcatttttatctctttagacatttatgaaataattaaaagttaaaaaataatattttagagtacgattattcaatgaatcttattatgtattttatcgttttttataaattttcaaattaataaaaagctaaactgagctttattttgagtcactttttagtaaaattgagcatagaaaagtatagaaattattttattctttccctttttccttgaacttaaaaataaataatatgatcattattgaattaaaaacaccttaccaatttaaaaaaacaaaacaaataaatgaacgtcttcaattacttttgagtcgttttatttttttatattagttccaaaaggtaggagtcttaaagcgccttgaagcctatggaatcaacaaaataggagtattcaaacaattaaaagtggtcttgtaacaattgtaaagagtctacaacaaggtgttatattacactcattagtcaaatgaacaagaatgcttacaatcacctttatataaagcttttaagttatttatggtgaactatacaattccttaatttttttctcattaaaccccttagtaaaatctaaaaaataaggaatttgccatttctgtgtattaagagctgttttatttaaattcttttcccaactaggataaacgcgaatagccattttacctttgtgtttttcagaactaataatccctttttcaaccaacaactctttagggaaaataaattggccttttttagatctgtctaatatattaataatcaatttatcttttgattctttacagttaaaaggtctatttttattagtctcatttttacgccagcatgcaacaaaatacccctcttttttaggagtttttttagccaatctacttttaaatttaattccattaaattcaaaattaaaagcctcatattcctggttccattgctcaagctcatgatttaacaatagaaatttgtaatcaaacaacggtatttcattaaaaaaagcaaaagtaatataattactattcataaaaaaattcctttctactgaaaatagattataaagaaatagtgctttattgacattaaccttccaactcctcaataaaccaaagtaaatgtccccttttgattaagtttcttattgctaaagaatgaaacttgtatattttcaatagcttactaacttctcatttagttatttctcttttgttcttactcgtgtttcttcttcttttttatgattaattttattatccagtttattttcatgttcaatacgattgtcataatcatttttgtctacttgatttatatgttttcaataacttcttttatttttcaactttgcaacagaaccatattaattatttttttaattagtaatagggttaattaatgattctctgaataaaaaccaccactttttgacattaacgtaacgtaatacattacaataaataaaaataaaaaaaagaggtggaaacaatggagttttatcaaatgccaatgtttaataaagtgctagttaaagacattgaaaaagcagagaaatggtatgaaaaaacacttggttttaaaagtgtttttaaatttagaaatgataaaaatgaagttttaatgaatcatttaagactagaaaaatatcaagacttaatgctaatttctcaaacagattttgaagttggaaactcaatatatttaaacatcttagtcaaagatatcgaagaaaaatcacaaaatatttcgcaaaaatttatagtaaaccaattagaagaacaaccatggaacgctaaagaaatgacaataaaagatccagatggacacttaatcacacttactcaatcaaatattagcgatactgatttcgaaaaattaatgaaacaaacttctaaaaattattagataacaaatctatattgttttattccaattgctttattgacgttgagcctcggaacccttaacaatcccaaaacttgtcgaatggtcggcttaatagctcacgctatgccgacattcgtctccaagtttagttaagggctcttctcaacttcaataaattttctccgcataaacacatattctactttttatttcgtgttttttatcgattttaaaataaaagaagttatagcacacactaaaataatacaaattaaaacaatacctaaaacgaaatcatttccagtccattcaacacctatcttcgaagtaccattacttttaaaatcagcatagaaattaatagcaattaatattaaaaaagtgatactagaaaggatacctaaaacatcaaaagttaatttcgcataaggatatttaatactcttagttatcatcacaaaaactcctttttgtttcaaaataacacattgctttttttatgatagcttaaatttataaaaagcaaaataagcataattcacaaaaccagtttgtattttacaaattggtttattttttattttaatcactacttgagatttataaaaaattagaatatccttatttacaattttaagacacttttttagatcatttaggggtgttttatataacatttcacctaaaactatgtaatgactcttaaaacgcaaatgagaaccaaataaatatattttaatttcaaaaacaaaaatctgagcaaaaccagtgacgaatttttagacaatgctcatctatatgcaaatttaaaattgacatataggctggataaacgtgccgtctaatcgtatagttccttcagaggacaaaaaaacatgaaaaacgttagattttgtagcaatccatgcttgttttattacgttttttgtaatactaatctttccactttgaatttctatactaaccagtgttataatgtgactaacaagaattctagcgtgaatacaccaaacccctcactattgccgtagtgaggggttttttaggtgtgactatagtctcctatttatcgttgcgattacgtagccaatgcgtaaataacgcaacaatacaaccactgatgattgtggtcgtgatgtgaacaagaatttctagcatgaataacacctcctctctgcgtctaaatttgacacctgagagataggcgactttattattataccatctgtgaatatacaagcatatctacttccgataagttaaattatgtattattttctgtttttctctttccttgtattttttcaaattcttctatatggttcgaaatcattgttggagtaatattaatatatccacttttaagctttatttttggggtaaataatagaaaaatgagttacattgatattctgagatagtgaggccatataagaaaataaaattgatgatgaatgaatagagaatatcctccttttgttatagatactatttttaaaaaaagatgattatattcaataaattcacatgatttatatgtaaattatgtatatttaacacaaaataataattacttaatttactcgtttgagtttgtattttaataacaggagcatattggctaacagaggatgattgtatgaaagcagttacttatcaaggatataaaaatatggaagtatgtgaagtaaatgatacaacagaaattatcactcatactataccgttagaagatgtaaaagaagcttatgatatctttgaccagaaaaaagataatactattaaagttattttaaaatcacaataacatatagatgaagacgccttattttgaataactcgttcaaagttgaggcgtcttttacctatatatttaaattttaacatttttctatttagaaatttcttccagaaattcatcccccaatcacaaattgcataaactactttatcgagtgtttttctatgtttgttaacttatactcaacttttggtggaactactggatagacaattctttcaatatttctatattgaaagaatctatgataagaaaagagttgaatgaatataataaatataaactcatccaactcttctatttctactgattgatatagcgtttcaagtgtttagatgtcaatgtttctgaactatcaataaagtttttaggtgttccactaaattggacctttccgccatccaacccagggcctggaccgacatcgatgatccaatctgcttcacacataatcgataaattatgttcaatcaaaataactgtattgttttgatcaattaaatcatcaaaacactccatcaatatagggatatccgattcatgtaggcctgtggttggttcgtcaaaaataaaaatactattttttatctcttcatctaaatgttgtgctagtttcacgcgttgaatctctccaccagacaaagtggataaaggttgtccaagtgacatataattcaaacctgttttacttacagattgtaattttgacttaatatcattctttttatcaaagaaaataataccttcgtcaaccgtcaaatcgagaacatcggcgattgaatacccatctatggtagcatctaatacttcttgtttataacgtttaccatgacaaacttcacatgtctgtgaaaaatcacccataaaagcaagttccgttttaatatagccctttccaccacaatttggacaggcaccttttgagttataactaaacatagctttatttaagcctgtttctttactgaaaaagcttcttacactatcaaaaacacctaaatacgttaatagattagatctattagatccttgaactgctttttgatcaataaagatggtatggtcattattttcaaaacctgctttaacaagggtactcttacctgaaccagcaacgcccgttaagactgttaatacgtgtttaggtatagacgtttttacgttatttaaattgttttgtgtcacaggaccgatattataaaaatggttcgcttcacgaatattctcttttaaattatgtttgttacgtaatgcgttacctgtcgaagtatttgaagagagtaattcattatatgttccttcaaatgtgatttcaccaccattttttcctgaacctggtcccatatctatgatatagtctccttctttaataacatcgggatcatgttcaacaattaacacagtattgcctttgtcttttaaagattttaaaatttcattgattttagctatatcttccggatgcaagccaacacttggttcatctataatgtaaaccaaatccgataaagaactatttaaatgacgtattaatttaagacgttgcgcttcaccgcctgataatgtcgttgtgacacggttaagcgttaaataacttagtccaatatattctagtgcttctaactgctttttgagaggatcaataatatatttagctgttggatcctctaatttattaagaaactctaaattttccttaattgtcatttgggtaaaatcagaaatatttttactcataattttagaacttaatattttcgagtttaaacgttgacctttacatgtgggacatattttattatttactacatttttaagatgtttggcgtagcgtttcttattaaattctttatcgcctaaaaatattctactgaatctaggtattagccctacatatttagctgactttctccattctttaggaggattttttaacgtcattggctcttgatataaaaataactctaattcatcttttgtatagtctttcaattttttattattatcaaataaaccactatctcgataggctttaccacgctctttatctggtccaaaagaaggaaagtctattgcaccttcatttaaagacttatcccaatctagcaattcatctaagttaatgtcttcaatatatcctaatccttcacaagttttacacatgcccttaggactattgaaggaatatgcatctgaatagccaacaaacggttcgcctattctagaccaaagtaatctaacggaggcatatatatccgaaactgttcctaccgtagagcgagaattcccattgaatcttttctgattaattgtcattgctacaggaagatttttaattttttttactttcggtctgggttgttgatttaaatgaaattggatataactggaataactttcatttagtagccgttcagattccgcagcaatagtattaaacactaaagatgatttccctgaaccagaacgtcctgtaaatacggttactaagtgttttgggatatttacatctatgtttttcaagttattttgtgaagcacctgtaatattaataaaatccattaagtatcctcctttataatctttacaacattgattattgcatattaatcaatgattaactactcattcaaaagacgacaactttaagtcttttatattacaaattattccaccaattcaatccgtcttcactaaataattttttcactttctttaggtccatagcttccagaggcataattaggaaactgtggctgttcttgttttcatacatttacaatatcaacgagtaatataaaaatgttttcaaaattcaattacactatatttatatcaatagcgttaatatttgttaatactgaaatttttgtcatctacgaacatattgatataaatagaattataaaatttaaaatatgactcatttgtcagtattgtttaaaaacaggagctatgtaaaaatgagttatatcaaatattaaaagatagatgtcagtactttaaatgtttatagaacttttaaataaaatacacttcaatatatagtactttctattataaagttattaattatctggacaggaagaaactcatgatactcgtttcaaaaaacaaaaaagaaagggttaattatgctaaatattaaagaccaaaattattttaaaagagcattaaatttctttatactatcaacaattctactactaatgacaattccaatcgctttattttttcatccttcagaagaatttataaaacaattaggatccaattcacctgaaagcgttagtaaatcacaaggtctaaaaaaagtttgggggtttatacaaaataatggctttcatgtaccaatacaaatgcttttgttagctttaatacccataccatttttatatactctaaacttaatagtatcacttattattcctggcatactattcggttttttcatccattttgatacttacaaaggtctaactagcttaatcgcttatataccccattacactttggaaatgatgagtttttgtatatttactagtggtctttatatgctaaataaatcaatcttaagaaaaataatcaatctattcagaaaagaaaaaaagcaaaactactctttcaaattaagtttaattaatttattaaaagcatatttattcgtctgtttaccattggttatattagcagcatttactgaaacatatgtagctgatatgctctcaaatttaatgaattaactacaatcaaaaaaatacaaaatcgcaaaaagtgaggtcattttatgtttcttgaaaaattaaaatgcagtcattgtgaaaaagaaatcgacaaaaacgaaaatataacaatacacacaaattcaaaaaatcttaatggcgtaacaaatctaaaaagttgggctaaaaatcaaaacgttttatgtgaaaaatgctcaaaataaaaaagagcctgtgtttaggctctttttatcaatacatcacatacgattattagtatttccatgtctttgtttaactaataaataaacaccatttattaaacccaaaatagtccaagcaactgataagtagacattatccagactataaattggagccataaaaattaaaaagaaaatattcataacaaacgaaatacgatgaaatgtactgagcttattaatatcaattctgttattttgaataataaatcacctcttgatatttatattatttcaaaatttttactttattccaattgctttattgacgttgaatctccgaacccataacaaacccaaaacttgtcgaatggtcgacttaataggtcacgctatgccaacattcgtttgcaagtttagttaagggttcttctcaacacaaaacaaatcttcttgtcataaatgtgcattttattttttacttttatttccttttaaaacataagtaaataaagtcataaatattgcaaaaaacaatgcagaaataagacttggatatacatcaaaatcaaggagaggtatcactaaatcaagtagcaaatttaaaataaaaaaagaaacaaagaaatatacgaaatataaaataaatttcaaaattaatcttccttttccaacaaaacgttatcacaaacataattttaaatatccctttcgcagagtatgttgattatggtttttattattatgtgattcttgtgtctgtttcttatccttatcctctcgatttcatcaatctgtgtaatgtttatcgaccatgcgcttaataatatagtactaattaatgctataattaatactttttcatcattaaaatatcccaaccttctaagatacttaacttcttagatgatctctttatttatcatttccaatatttacttttagaattataaatcacagatgctattccaaagctggctataataaaaatgagtatgtatatagaaaagttatcagtctgtatgtaaaatttaaaaagaagaaacaataagaaagccacgatgaaatacacaggaataaatgctttcttccaaaagatagaatctttcatgaatatcctcctttaataatatttttttatctatatattaaggttaacattttatattaatctatttctaaaactatttgtataattatattttattctcatatgtaaaaacttagaatataaataggtgtcttaggtatgtttaaattatagttttaacaaattatatacgtagctttctaatcatacttttaaaaattcagctataataaacaatcgtaatgccttttatcatcattgtaattgtacaaaaatgatagttgattgttattttaaatcacgttatgtttgaaacaagaattctagatgtacaaggagattattacatgaagtttattagtattgttttaggattgctagttatcatttcatggttatttgttttacgagagtaccaacatggacatgagaaaacagaaaaaggaaagttagtcattatcattgcttgtatattaactttcattatgacacagtaacatgatccacgtagccatccgtaacatggaatgtaatatgacctttacctactgtgtaaccgtataatccttctgttttatctgcttgttttttagacaatggttgttgatattgataatgatctccgtaaacgtctttcacttgttctaagcttacttttttaggtgcgaccttaaaatcaatcattgctgctgtgttgcctttgacttgattaaatgtttggtcatacttcgttgttgttgatgtaccgttttgatactgatcattcactttaattccgttaaatgtcacatttccagcttttaacgcattatagaacgtgtgatttaatacgaattcgccacctgattttgtataaccttgataatgataaccttgtgacgtttgtgtttgtgcatgtgcttcatttgatacaccgttatgctcagttacattaaaccctaatactgttcctaaagtaataccaccaacgaccattgcttttgcaaatttcttcattatggatcactcctcttatagaattaaaatgaacttccatctttaatatataatattacactcatacattcaaaatttttataaattaaaatataattttatttaaacataattaattgaaagactaattaattatataatacttataatattactctgcttttttattctttcattatttttaatttatatttaatacatgttagccttaaatcatacatattttaattgataaggagattactaatgaaaacaatacgttatttcctatatttttttatcgtttattttataatcttttacttagcacaacgactattaaaattagatttaggtattgtgcgttgtttcatttcatccgtcattttcgctataatgatgagttattttgcttactttgcgaagaaacttaatagataatgcctatgtttatttgtcatacttctgcttcattctattaacggtacttctttctatatcagtagtattcctatgaaatattaaaaagcatcatgacatggtatcaattgctagaaatgtaaataataaaaaatatgtagcatggatatatgcagacttcttagatgtaaaggaggtattgtctataataaagatcattggtgtagctatgtatcttgttcactccacaatacctttatcaaaattaacgatggacatgtttttttttataaaaacgggaatactttactatacgctttaactacgtaaaacttaataaatggaggtcatattatggctggatataaatcaccaggacgtaaaatttctgaatatattggcattattgctatcgtagcagtatttgctggcgttttttataaaaaccttaaaaatgaaaaccaaactggtaacggttctttaggctaatttaaatattttttatagatgataaatagagccatccttcactcatcaagtagtgaggggtggcttgttttttattctggtctaggactacgtttcattttaatatattgagagatactataaagcgcaataccaatccaaataaagataaatgtaatgaattggtggatatcgaatttttctttaaatacgaagatacctagtaaaaagataatcgttggactaatgtattgaataaatcctgtcagtgatagcggaatgcgacgagcgcccgctgagaataaaataagtgggacagctgttaccgctccagagaataagagtaaaaatgtactcatattcaaaccgactgatgattggtgtgcttgccataaataaatgatataaatcagtcctgctggtgctgtcacaatacattcaatcgcaatcccactcattgcttcaacacgtaccaatttttttagtaaaccgtaaatcccaaatgagaatgccaacattaaagaaataattggaaattctcctatcttcattgtcatgtaaataacgccaattgcggctgatacaatcgctaacgtttcaaatttattgaaacgctcttttaagaaaataaatgcgagtaagacactcactaacggattaatgtaataacctaaactggtttgtagcacatgaccattagacactgcccaaatgaacgttccccagttaatcgtaatcacataacctgcaatgataatcgcaaccagttgaatcggatgtgctacgagttgattgatatcatgtttaagcgcttgtgatttttttaatacaaaaatcattagaatcataaaaaccatcgcaagtataatgcgatacgctaaaatttcaaatgcgctaataccgtgaatgaatctccaataaataggtagaattccccataataaatgcgctcctaacgcaaataaaattccttttttaaattctgcatgattatccatgctaaaccctcctagcaatattaccctggaaatatgtataacactatcgtatcagtagttagacgaaatgagtatatctaaggagttttttctatttaaaaaggtagcgagatataatcgctacctttcttcatcatctatctattttctagttaatgataaattttattgccgccttctctaaattcttcggctttctctttcatgccttcaagctgttctttgtaggaatcgcgaatatcatgtgataagcgcattgaacagaattttggtccgcacatactacagaaatgtgcaattttcgctgattctgctggtaatgtttcatcgtgaaattctctcgctcgatcaggatctaacgcgaggttgaattgatcaatccaacgaaactcaaagcgcgctttactaattgcatcgtcgcgttctgttgcccctggtaagcctttagataaatctgctgcatgtgcagcaattttataagtgaccacaccatcacgtacgtcatctttatttggtaaacctaaatgttctttaggtgtcacgtaacataacattgccgtaccatgactcgcaatttgagcagcaccaatggcagatgtaatatggtcatatgctggtgcaatatctgttacaagaggtcctaatgtataaaatggtgcttctttacaataaaaatctgctaaatcttggttttctttaattttatgcattggaatatgccctggaccttcaatcataacttgcacattatgtttccaagcaatatccgttaactcacctaacgttttcaactccgcaaattgactttcatcgttagcgtcataaattgaaccaggtcgtaaaccatctcctagagaaatagcaacatcatattgacttaagatttcacaaatctcatcgaagtgtgtatataaaaagctttcttcgtgatgtgcaagacaccattgtgcaataattgagccaccacgagaaacaatcccagttaaacgatcaacagttaatggaatatagtgaagacgtaatcctgcgtgaatagtaaaataatcgaccccttgttcagcttgttcaattaatgtatctctatacgcttcccatgttaaatcttctgccaccccatttactttttctaacgcttgatagatgggcactgttcctactggtacaggtgagttacgtaagagatactcacgagttgtatggatattttttcctgtagataaatccataatcgtatctgcaccccaatgtgtggcccaaactaatttttcaatttctgcttcaatagatgaagacacaatagagttaccaatgttcgcgttgatttttacagagaagtttttaccaataatcattggttcagattcaggatgattgatattattaggaataatcgcgcgtcctctcgcaatttcttcccttacaaattctggttccacttgttctctaattgctacaaatttcatttctttagtgataatcccttgtttagcgtagtacatttgtgtcacaggtgtctctttactgctacgtcttggttgatattcaaatggatgagctacatagtttttatggccttcttttgaaaaaccattatcaatcgattgaatacgacgaccttcataatgttcaacgtcttcacgtgcttcaatccatgcatcgcgaacctttggaagtccgtgattgatatcaacctcataactgtcatcatgataaggacctgctgtatcgtacactacgacaggttcattttgaaaactacgttgttctaattgggtatcagaaagttcaatttctcgaaatggcacaaagatatcactatccttaccctcgccttttttaaaaatacgtttacttgctggaaaagttcttttaaaattgattttttcttgtttcattaacaatgcctcctaagttaggttactagaagggtctaaatatcactgattatatgattcataaaaaaagcattcagcttaatactgaatgcataagaataagtgaatatatacgaaaatatatgtaagtatcataatgaagaaaatgattcatcgttaaattgaccttttcatcaaattatgaaaacatccatatgtcattgtaaagtgactcactagcttccctacgctagtattaactagatcaggttcaaagggttggaacatgatgttcctttcagcaatataaagcacccctagcagagattattaaattataggttacttaacctatacttatacaatgacttaaaattccaagaatatcaagtcaatatattaaatattttttataacttttagacatccgaaagtctaacttcacacaacccgaagtcttacttaaagattgaaaaatcagcaaccacaagggttactgctgttctatttttttgacttatcctccaaagaacaaatcaataaagtctctacttcggtttctatcttgtttataaaattcggtatatccacaatttttacaagttatcgtcttaaaattattatgttgtacatctaaaaatttagacaatcctgatcctgttgctgataacgttccttcttctatttctgtatgaccacattttatacaaccttgattttgattttctgacataatgaatcactccttcactttatttttacgttttttaaatgtagagatgaaaaacgcaatattcaatattaacaataacgcaatggctacgatcagtgaaacaataatagattgagattctgagcgactgtacattttaactacccatccaattatatctggcaaacaaacaataaatatcactaaagcgaacaaacgctgtttcaaaacaaaacataaaatcattacaattaacaacagaatcagtcctatgatcacactttttgattcagttagtgtaatgatataataaatgggatagtgttttgtaaggtacgtacttaataggatgaaaccaaaaataactgctccccatataaaagcataaatatatattcgtcgttgctctccatactttacgagaccctttctaattaagaaaaaaggtaaaatcgtagttatacaaaagataaataaaatattaataataaaaccaattgttacattaagttgttctgtaaaaaagtttgggataataaaaatagctagcataaatgctgaaaataaagctaagtatttaaataatcccctagttaaaattatatattctgagaactgatcagcataatcttttactgaagtatttagaatatcactaacatcatcatgattcttttcggcaagttcgaaatgatctcttaactcttctataatatcattaacctcatgttcatctttacctctaaataagagttcagcctttaacttaaataagtagtcttctttttctttacttatcatcattatcactcctgaatatatggttcatacctttattgagcgcttgccacttttctttaaattgctgtaattctttgagtccactttctgaaatggtatagtacttacgattaggtccaccattatccgatttacgcatggttgtatgtacataaccttttttatctagtcttaagagcactggataaatactgccatcactaatttcaggaaattgatgttcctttaatttctcaagaatttcatatccatacgtttctccttttgcaataagacctaaaattgctccatctaaaagtcctttcattatttgattagatattgtcatgtgatcaccttttactaactatcttataatataagatagtataaaataatagctccgtcaactaacttataatgtaagatagttgagtataaataaagccccagaagtactttatactcctgggggtcttcatgataaaaagttatttattatctataacatcaatagatatggattttcaatatatttagcaagtacttttaagaaatcagctgcgcctgcgccatctaagatttgatgatcgaatgttaaacttaatgggatacgagagatttgttttacatgatctccttcaagcacaatttctttagctagagcaccgacacctaagatacctgtttcacctaaatttaaaattggtgtgaagtattcgataccacttgcacccatatttgtaattgtaaatgtcgcaccactaagttgaacgtcacctgtatttccttcacgtactgcttcagctgatgttttaatttcttttgctaaagtgccaatacttttagtatctgcattatcaataactggcaccataagaccatcttcaagtgatgtcgcaatacctaaatgtacatcatcatattctgttaattcaccgttttcataacgagcattcattgcgccatattctttaagtgataggactactgctttagctaataaagctgtgactgtcaattttacatcttgatctgcatcttttaattcttcagataatcgagctttaaagtctaataagcgatctgcattgactttgcgatgtaatgttaattgagcagtattataaagactttgtcgcatattttgagcaatacgttgacgcattgggtttagaccttcaccaatgctagacacatcgacgttttgtgccgttgaagatgcgctttggtcagacgtacccgcttcaccttcataatcatagccttctgattctacacgttgaatatctaattttgtaatacgatcatttccacctgtccctttgattcttgtgatatcaaggtccttatcttcagccatattacgtgctaatggagagataaagatacgttctcgttgttcaggcttcgcttctttttctgtatcttttttatcagattgttcttcatttgaagaagcttgttgttcttcagaagttgtgtcgttatctttattctcttgggtagtttcttcagaatcatcgtcatcgcttcctacgtcttcgccttcttctccgatgataccaagcactgcttttacttttgcatcttcgcctgcttgtactttgatttttaataacgtaccacttgcaggtgcttctacatcatttgttaatttttcagagctaattgtgacaatgctttcgccttcttctactgtatcaccttctgatttaaaccactcttctacagtaccttctttcattgtcataccaagctttggcataataatattttcacccattgtgatacacctccctacgcgttagccttttttaagtcatcaactaattcagatgctacgtctaatactttatctgcatttggaatatatgccgcttctaagttagatgcaaatggtactggtgtatctggtgctgttacttttttgattggtccatctaaataatcgaatccaatatcaccaatgacagaagcgacgtcaccagcaatgttacattgtggacttgattcatcaataacaattaagcgtcctgtttttttcactgattctaaaactgtatcttgatcccatggagacactgaacgtaaatcgatgacttctactgaaacattatcttcttcaagtcggtcagctgtttcttcagccacagcaaccattttaccaattgcgacaatcgttaaatcatcaccttctcgtgtgacattggctttaccaatctcaatcgtataaggttcttcaggcacattacttttttgaccaagtaatgttttatcttctgaaaatacaactaagttatcatcttgaatcgctgacattaataatccttttgcatcatatggatttgatggtacaactactttaacacctggaattgttgcgaacatattatatagagattgagagtgttgtgctgccgcacttgcgccagcgccatgaacggtacgtactactaatggaattttagctttaccaccaaacatatatctcatttttgcaccttggtttaaaattggatctaaaccaaatccgataaagtcgttaaacataagttctgcgatgggacgtaatcctgttgcagcggcccctacagctgcacttaatgtaatatgttcagaaataggtgtatcgatgacacgtttacgactatattttttagcaagcccttttgttactccgaacacgccaccaaatgtatcatcatcttgaatatgttctacttttgcgccacctgaaacgtctgtaccaattaagatgacattttcatctttctccatagattgatcaatcgcttcattaatcgcgcccataaatgttagtttacgttcttcactcatcgtaaaaacctcctcgtctggttaggttcgttcttatctatttcttcgttttagtgctttaaagatttgttatgcaaagacatctttgtatagtgaatcttcatctggtaattcactttcgtccgcaaatttcacagcatcttctacggcttgttcagctgttttttcaatatcgtctgcttcttcttcagttaaccaaccttcttcaatcgcttgttttctgaattctacagtggcatttttatccgcattacgatcatttggtgatttaactttttgttcgtcaccttcaaagtgaccatatttacgatacgtatcacattcgattaatgtaggaccttccccttttttagcacgttctactgcttcttgtgtcgcttgatagacttctaaaacattcatgccatccacacgtacgcctggcatattatatgcagaagcacgttcagcaatcgtttcagatgcacttgcatagtcatgtgtcgtaccttcagcgaattggttattttcacagacaaagataactggtaagtttaaaattgaagcgaagtttaaaccttcgtggaatgtgccttcatttgcggcaccatcaccaaagaagcatacggcaacattgtctttaccttgattgataattgaaatacttgcaccaatcgcaagaccaaagccaccgcctacgataccattggcaccgagcatccctttgtcaatttcggcaacatgcattgagccacctttaccatgacctaaaccatcacgtttacccatgatttctgccatcataccgtttaaatcgcaaccttttgcgatagcatgtccatgaccacggtgtgtacttgtaatataatcatcgtcagttagttgtgacatgacacctgtggcaacggcttcttcaccgacatataaatgtacaaatcctgggatttgaccatcactaaaaattttgtgtaccttctcttcaaaaaatcgaatttcattcattgttttataaatccaacgtgcttgttctttttccattttcattgtcaattcctcctatctttcatagggcataagtgtaataactacatgtgaattgcagaaccaaagtatgcatccccaccttcgccaatcgcttctaataatgcgggatgtggttgaattatttcggataattcatagatggtaccttctgacgcttttactcctaggacttcgccaattaagtctgtcgcatgaggacctaccataaaggcgccgagtatttccccatatgtttgatcaataactaattttataattccttcgttttcccctttaatgagcgccttcgcattaccttgaaacgctgattgtgtgactttcacatcatatccagcttcttttgcttgctcttctgataagccaatggatgccgcttcaagtcgtgtataaatacaacgtgtaatgttttcttgacgaacaagtggtgggtgttctccagcaagtgtttcagctacatgaataccatgtgcacttgcagcatgtgcaagttgatatcctttgactaaatcaccaatcgcatagacatgtttttgacttgtttgataatggtcatccactttaaagaacttgccatccatctctaaatttaaatctttagccacttgtgtattcggttgtctacctgtcgcgacaagtaacgtgtcgaagctgacgtcatcttgaccatcgagtacaattttggttttatctactgttttaattttcgcttttgtaataatgttaatgccttgattttctaaatgagcttttaataactcacgtgtatcatcaatttcagtaagtaaaatatcatctgccacttcaacaatggttactttcaccccaagatcggccattgatgaagcgagttctgttgcgatgacaccaccgccaatcactgctaactgtttaggtagttgttttaaatcgaaaaatgtatcggttgtttcataatcgacgttatctaatccttcaataggtggtacaaatggtttactacctgtcgctaaaataatatctttaccttgatacgtttcattatttacttttacgtttaagtcttttgaaatgcttgcttctccctcaatataagctactttatttttctttagtaactgtttaacgccacccgtaagtgtttgtacgactttctttttacgttgtacaaatttaggaaaatcgatatttaattctttcgtcgtcattccccagtcattcgcaacttgaatgctatgtgctttttccccgtgttctaataatgttttagatggaatgcaacccacatttaaacaagtgcctccagcattgaatttttcgatgactgccacctttttacccaattgtgcggcacgaatggctgatacataccctccaggtcctgcaccaatcacaatcaaatcatatgattcactcatgaatgaacgcctccttccgtaagagaacttttatcattttattataaagagatatttgtaagcgctttctaatctcttcattttcattttacactttatattttgaattttcaaattatttagtatttattgttttttattttttccatgcaagtagacattaaaaatttggtgaaaattttaaaataaaatctatataattcttatttgaaatgcgttatactttattcaatatcacttttaaaaggacagttaaactatgattcaaactatcattactgctgcgatattgtatatcgcaactgcagtcgacttacttgttattttgcttatttttttcgcgcgagcacagacaaaaaaagaatatagaaatatttatattggtcaatatgtaggatctgtgacattgattgtcgtaagtttattctttgcctttgtcttaaattatgtgcctgaaaaatggattttaggattacttggtcttattcctatctatttaggattaaaagtagctatttttgatgattgtgaaggagaaaaaagagcgaaacaagaactagacaaacacggattaactaaactaattggcacggttgcgttagtgacgatcgcaagttgcggagcagataacatcggattatttgtcccttactttgtcacattaagtgtctctgaactcattgtgacattaatcgtctttttaattttaatctatgtcttagtgtttactgcacagaagcttgcatctattcctgaaatcggagaaactgtagagaagttcagtcgttggatcatggcagtggtctatattggacttggtttatttattattatcgaaaaccataccttgcagacgatttggggaatgttattttaaattaaaactataaaaggactctaacctaagctagagtccttttatttaaggttgcaatttcatcatcgcaccaaattgttgttgggcatttgtaaatgtgatgaacgtaataagttcgacaatttctttatctgataaatgagactttaagacctctgtgtacgttgtaggtatttgatctcccagtttgatatagacttctgtaaatccaatacatattgctgatttttcatctgttagactcccggtaggcttgccttttgctttacaatattggcatccatttttctgcgctagcatacggcgtatctcttctttgagttctgcgtttaaagcactagtattttctagtgtgtcactcaatgcggtccacgtcttcataatgtcctcatgatgacctaataattgttgaaatggtgtatgacctatgtgtgagggttcaataataaccatgatatttctcctctatttagactaaagccgcttttattttttgtagtccttttttcattacttctctaggaactgcaatattaattctaatatgaccctctgcgttatgaacaaattgctctgcgccttcaataatgacgccagcgtttttaataaagaattttgccattgattcatcaatatctttttctttaatataatagcttaaatctacccaagctaaatacgtcgcctctggaattttaaattctgcatgcggtagttctttttttaggaaatctgctaaatagttaaagttatcgtctaaataatgattcattacttgtaaccaatcttcgcctttttcataagcagcttgcgtggcaaccacacttagaggattttccgtaccaaagtgatgtgtattccaagtttttagaagtgattcattttgaataatgatatttgaaaacatcaaacctgcaatgttgaaggctttactttgagacatagttgtgatgattttgtcgtaacctgggacagctttggcaaatgggatatgtgattgacctgaacgtttgatatcacaatggatttcatctgaaatgagccatatgtcattatctttcataatttgacccaatgtggctaactcttcttctgaccagacacgtcccgttggattatggggattcgcaaaaatgcataatttaatattttctgtttctacttttttacgtacatcgtcaaaatcaatctcataatatccatgatgattgattagtggagaatatactgttgaaatatgatttttatcacatgccattttaaatggaccataacttgacgtaaaaattaatgctttatcatccttatcacaaatataacctacaagttcaattaacccagctacaataccgtgagagaatacgaggtgctcttgaggaaaagtgaaaccataacgtttctttgtccaagatacaaaagcttcataatattcagaaccgaagacgtttgtgtaacctaaaattttcttatttaaacgttcacgaatcgcatttaatacgacttctggtgtaccaaagtccatatctgctacccacatacgaatcagttcatcattatcttttaaatctgacgtatctgcattaccaaaaagataacctttgtagccttccacattcattgaatttgtataacgacgatcaatgatttcatcaaaattgtaattcacgatagttcctcctaaacatgttcatgtgttttatcaattatcattctaatacttacgttatattctgtatatcaactttacttttcattcaacgcagtagacacgctttttaagcgaaaaactcctcacttttacatcagtgaagagtttaatgtttgaatacatatattatgctagaccatcaataacgtatgtcacacctaggactgcgaatgtaaatgcgattaaggttgaaacaaaaatcatacccatcattggattaaataataagataatccctaaaataatccctaggatatttacgataattgataaaccgcgtaattgatgttgttgtgatagtgtaaacagaccgataaccgaactgaaaataaaccaaaacgcaaacataaatacaaagaatactgaacttgctccaacattaaatacaacaagaataccaaaaattaaatcgataataccattaattaaaattaattttgtatttactcctacgagtttttttgccgtacgacggaataaaagttgaatgacaccgcctatcataatgagtaagccaatcagccaagtaagtgtatagaagttttgaactggattactaaatataaccacagcaataatcagtaatagtgtaccaatgattaaacttgaccaatttaattttccactatcttgggccattattatctctcctttttatacttaaagattactacaagtataatttatctattattggaatacaaaaaacctcactaatcgatggattagtgagggtacttttacgaattcatagaattggtaaattgtatattagtatgtaccaccattaagatttttcaaacaacttttgtaaagttattttcaatcacattaatttataattttaatataaaaaatatacctagcatgtgttattcctctttaaaaatgggtaattatgaattacgtaaacaatttaggaggtatacaatgagtaaagcattagttgtagttacaagtgtttcaaaatatcctgatatgaatcgtccaactggattatggttgggtgaagtcgttcactttgcagatgtgttatacaaaaatggttatgatatcgactatattagtccagaaggtggctatacagctatcgatcctgcaagtctacaagaagatatgatgtctgaattagattggaaatattatcaagataaagacttcatgacacgtcttggtagtacacttacaccagatgccgtacgtgctgaagattatgatattatctattacgcaggtggtcacggaacaatttgggacttcaaagataataaagatttacaagaattaacacgtaaaatttatgaaaataacggtgcagtttcttctgtatgtcatggtgctattggtctattaaatgttacagatagtgaaggtaattctattattaatggtaaaactgtaactggtttctctaatactgaagaagaagcagttggcttagcagataaagttccttatttaacagaagatgaacttaaaaatcgtggtgcacattacgaaaaaggtgacaactggagtcaattcgctgttattgacggtcatgtgattacaggtcaaaatccacaatctggtaaagctgtagctgaaaaattcttagaattaaaaaacaataaataagacaccccgcagtgttaataaaaaagttggacctttcaatctttagaaagatccggcttttttatttactctacttcataatcatttcaatgacagctctaatatttttatcgatatatttatcaacatgttgagcaaggtaatagtgacgtttcacatttaaagttgttatcattaatttttcataatcttcgggatgaattgctgattttgaaataatcgcaaacccatttccatcctctaccatttgtttgataatcttaatattattaatttctatcaaatatggatttaatttcaactcagaaagacctacttcctgataaaaccttgttccagaccctttttctctaacgaaacatatatccattctaggttgaaccgattttttgtaaatatacaccatttcgtcttccattattttcttacattctattgcattatcttgaatttccttttctacaatacctatatctactctgttgtgtttaatatcatttataacagaatctgaattattaacacgtaaatgaatatgtaacttagggtattgttgcataagactggtaagctgttttgataataaatattcaccatatgtataactgcttccaattgttaaagtgcctgagatgatctcagattccgatgttaagttttgccataattcttgttcaatactttctcgctgcaatgcatattgtaatagcttttcgccatctctagttagttttaaatatggagatttaaattcaaatattttaatattatattttaattctaaacgtttaatatcacgactcacagaaggctgcgaagtatataaattttctgctgctctagtaaaactttctgttttcattacttcaattaataccttgtacggatccatacataattctcctttaagtctaatataacatttttgatatatatactatacttattatttatttaacgttataacaataacgtgctaagatttcatatcgaggtgaaagtactatgaaatcaatcacgcagccttcatttatgaaaggtattatgtttacatttatgatcgcaatgatcagttatatattagctaaatttcctattttacatacgattggggcattagctattgctattatttttgcgatgctatatcgccaagtgatgggatatccagaacacattcgtccaggcattacgttcgcgtcgaaacgtttattaaaatttgcgattatcttatatggattaaaactaaatatgggagatattctaggtaaaggctggaaattactacttattgatattatcgtaattatcttttcaataagtttaactttaattttgaatcaaattattaaaggaaatcaagatatctctatactacttggtattggtacaggagtatgtggagctgcagctattgcagctacagcaccaatcttaaaatctaaagaaaaagacattgcaataagtgtaggtattattgcactagttggaactatatttgcacttatttatacagctatcgagtctatttttaacatacctactataacttatggcgcttggacaggtatcagtctacatgaaatcgctcatgtcgtcttagcagcagatattggcgggccagaggcaatgacatttgctttacttggaaaattaggccgtgtgtttttacttattccattaagcattgtcttaattttgtatatgcgttataagtcacactcaagtcaagtacaacaaaaaatcgatattccttactttctcattggatttatcataatggcttgtatcaatacatttgttcctattccttcattacttatgaatattataaatgttattacaacggtatgtatgttaatggcgatggttgctctaggattgaatatcgttttaaaagaagttatttcaaaggcacttaaacctttcatagtgatatgtataacttcaatttgtctgtctggtgtgactctcttagttacttctataatatttaaataagtaaacatgttatatgcttatatttaaaataaaaagcatgcatttcaccattttgaaatgcacgcttttttaatcattattcttcaatgtttgttaaatcttctaagattaattctgacgcgattaggcctctatattttgcccaacgttcacggtttacatcgtgtacacgatcatttctaactgcttcaatatttgaccacgcttctgattcttttaatttttcataatctgctttgttatcttcatctaccataatcaatatacgttctggattgaagcttgcaaatcggtctgtatctacttttaagtaatctgcacccatatattcaggtaggtggttctccatatcttcaggaatagaaccattaaaaccaactttttgcaagaattgtccaacatatgaatgtgatgcatgaacatataagccatcatgtgttggtacagcagcaatagttgatacgtctttatcaagtttaatatctttgcttaagtcttcaactttttcattgtgttgaacaacaagttcacggcctttatcttctttagatacgagttctgcaatttgtttaaatgtttcaatactttggtcgtagttagcatcaaaactttctaataatactgttggtgctgccgtatttaatttttcaaacattgattcatgtcttgttttatctgctaagattaattgtggttctgcttttttaattaattctgtatcaggctccaaacgtgaaccaacagatgtatagttacctactaagtgtttaatagaattttctaagttatttttatctttgtcatcagcaatacctgtgacattcaattctaatttagctaatgcttctacaaaagaatattctaacgcaacgactgattctaattcatctggtatttctacgttaacaccattcgattcaaattctttacccataatataaatccctccaaatgagatgacgtttcatttttcgtacaatatagttatttacgttttagagaaatttaaacatttcattcttttataaaaaaacgattagccacatggactaaccgtttttaaattcttataacatgttcatttttaataaatcaatcacaccacttgaagcacctgggaaagcaaaaatcaattgacttaattctttggctgttaaacgttgattaatgataaatacaagtaagtttactaaatcattggcagcatctgcatagatttcagcacctactaagtgtttatgttcatctagtacaatatacatttcagcttctgtttcattcttatattcgaataccatttgtttaccgaatggcacatgttttactgtatattgatcattttcttttgcgtcttcaacagttacaccaatttgtgataaacgtggaagcgaataaagtaccgaaggaatagctggatatttaatttcatcttgtaccatacctaaaatatgtgcagcaatgtagtttgattcaaacgtcgcagttggcgttaatttaggaatcgttttatctaaaacgtcaccgcttgcgtaaatatttttaacatttgttcttaagtactcatctacttcaataccttttttactataattgataccgacattttctaatccaataccttcaacatttggaactcttcctgttgcatcaagtacatattctgtattgattgataatccagattcagttgttagtgtaaacgcgtctccttcttttttaactgcagctgtattttcatttagataaaatttaacgccttcatcttctaatttttcaactaatttatctacatgattacggttaaatcctggtaaaatctcatctgtatgatgaaccacatgaacgtcagcgccagttttaatcatgatagatgcaaattcgatactgataattccgccaccaatgaatgtgatactttttggtgtgtcttccatcgataagaagtcacggctatcatgtgtatattctttaccttcgataggtaatttattgctatgttgacctgtcgcaacgacgatattttcagtttcaatagcttcaccatttacttcaactgtatgttcatttttaattacacctgtaccatcatatacatcaataccttgttgttcaaataatgattttaactgaccagccattggatcaatcactttatgtttataatccattaagtttgaccaattgactttaagattttgtgattcaacaataccaggatagtgtgttgcttcttctaacacttcaaatggattttcaagtaagattttagcattacagccccagtttgtgcatgttcccgcaatacgctctttttcgataattgctacttctttacctgcatgttttaatgttaaagctgcgtgccaagctgcatgtccactaccaataaatgtaacgtcgtatgttttcatttaactcatcctcttctttattttttattgagttgtttcaaaccatgttctaattgttctaatacgtcttttgcttggttatatttcgttttatcaaaatttgaaggtaaacatttggctaccgcttcaaaaactgcttcttgttgttgatgtgcttgttcagtaagtgtcaccatcagttgacgtttatcagtttcagaacgttctcttatgacccatcctgattgttctaatctttttaaaagtggtgtcaacgtattacttgataaatcaagttgtctaccaatctcatgtaatgttcgattatcttcttcccataaagccagtaaaactaaatattgagaatacgttaatccaaatggctttagttgttgttcataaaattgagcaaataagcgactcacattatatgcagaaaaacataattgattcgctaaagtcatctcgttcttgtccaatacaacacctcttttcaatcgtgcaagatttattttagtataaacaatcgcgcgcgattaatcaaatgataaatatccaaatatttctaaaatattgaaggtgtagaatagaatttattttaaatttactgttccactcccctaacacttttgctagtttaattagaaaagactcactttcctttaataaaagaaaatgagtccatggtttacttatatccaatcggtaaatatttattttttaatctttttttcgtgatttttcgtattcttccgttattaattcagatgcttcactattaatcagacttttaattttttaaaagtaagactacctgcctactaaaaaagataagatatgctctctttatttcactttcaatcctctatatcgatttaaggtaccgataaattcttgtttacgaggtaaggcaagatttcctggatgtccattaaaatgagagagcgcttctaatccttcatgctcaattaagcgatacatttcatttgttgcttgaattatggaattctgattattgataccatgacgtctaaagtaatctaacatcaccgtaatagcgttggtctgactatcatccacaagttgttctaatcctgttaggttaataggctcatgaccatacataatagaatgtaatccttttgctttaaaacgtttttcttttccttttttagagaaagaatctgttaacggtatgcgatgagatagcactccaaatgactgatcaccatcaatttctcgcttatagccgtcagtattcgcaatttcttttgcttcttctgttacatcttttaaatgatattcatccatcattaacacttggtcagcaacatcaaagtaatctcctgaaccgccaacaataagaatagtagaaacactataatcttcatataatgattttactttattagaaaatggagtaatcggctctttttctggagcaatcagttgttgcatacgaccatcacgaatcataaaattagtagctgatgtatcttcatcgactaataataatgaactttctgcttctaaagcttcgattacatttgtggcttgagatgtactaccacttgcgttttctgtagaaaagtgtgtcgtatctttctttcctggcagattatcaataaatggactaatatcgacattttcaacgtttcgaccatcctcagcacgtattttcatcgcatcatgttgagtcaccacaaattctcgaccgtcatgttgaatgtgatcatatacactacgctcaagcgcttctaatagtgtcgatttaccatggtaacctccaccgacaataagtgtaattccttgtggaatagccatccctgtgactgcccggccacttggaagattgaatgtatgttcaaatttcttaggacttgtgaattgaatggcacctttcattggagcgtctgacacaccactttttcttggtaaaattgaaccatttgccacaaatgcgactaagtgctctgtttcaagttgttgtctcatataagtctggtctagttttaatgcgacttgttcgttcaatgcttgttgatttaaattttcgtatcgtatcgctttttctaccatttgaggaatgccatgtattatcgtatgtgatgctgcttttcctagaatcttacgtccagctgctggtagtccaacttcaatacgtatttcaatctctttattattaatcactacagatgtacgttcgagtatctcttgtcctggatgatcaataaagatcttcccatttttaccagagcctttcacggtacgattgaaatgttttaactgggtatccactgttcgagttaaaaagtctgaagtcgctatacgtttatctttagtgtctaataattcattaggaatttcagtctcttgtttcccaataatgacacgcatttttgaaggtggcgcaaaaggatcgacttggacatgatcgatagctagacggaattgatcaaattgatatatccctttcattcgtttataagcgccatatttttgtccgtctaaagatttaagtaatcgttctaaatcttttgactgtttcatcttaattcctccgttcatagcattgcttttttatatttaccctttttttaaaaaataaaaaatcactactccaaatcattgaagtagcgatatacatacgttattcagatttaacacctgtacgtaatcgtaactcatgttcaatttcagctaaactgcgaccccgtgtttctggaagatacttaatcacaaagaacatcgctagtacgccaatagcagcaaaaattaagaatacccattctgtatctaaattatgatttaaaattgggaataattgtgcaacgattaacgtaccaaagtttaatactaatgccgcaatacctgttgctgctcctcttgcacgcgttgggaataattcaggtaacatgacccataaaactgggccccatgaaattccaaagaacacgatgaataatgataaacaaataataatgatccaggctgatgattgaataccgattgaccaaataagcatcgccataataaccaatgaagcaatcattccgatgtttcctataacgaggagttttttacgatcgacacggtcaacaataaataatgccaaaatcgttactaatacgtttaccacaccaataccgactgtaccgataattgaagcagagccacctagacctgctttagtaaaaatcgttggggcatagaatataactgcgttgattccgataaattgttgaaaaatcgcaaagatacacccaataataagcgtcggacgtaaccaaggtgatttgattactgagaatgtggattctgattgagaagctatttctttcatttctttaatttcagcatcaattgcatctggattatatgtaattttcattacgtcacgcgctgctttttcacttctattttcaagaagccaacgtggactttcaggcataaatgctacaccaattaataaaattaatgaaggaaccacagctaaacctaacatccagcgccaagcgcccatatctgcaaaggcatagttcactaagtatgcagctaaaataccaattgtaatcattaattggttaagtgaacctaaagatccacgtagttctgtaggtgccatttcagtaagatatacaggtactgttgacattgaaccccctacggcaagtccaacaatggcacgaccaataataagcatgacaatatttgttgaaaatgctaaaacaagtgatccaacaataaataccaatgcgataaatagtactaagcgacgacgaccaattctatctgataaaggtccactgccacctgcacctacaatcgctccgaaaagcattgatgacacaactaacccttctatcgccccattatgtaaagggatgtccttaggaatataaagtaatgcgccggaaataataccgttatcataaccgtaaagcaaacctcctaaagcacccaaaataaaaatcaaatatttatttactttcatataatatccttcctttttcaaactagtaaatattatacgtattaattgaaagcgtttcaatattttttgatttaatttaaaaaagcaatcttcacattatagctgtaaagattgccattcatattagtatgatataaaatcgttttcttttctaagcaagtaataatggacttgaaaaaataagaaagaaaataattgttaaaaataacgtgatactattaaatactttgctgccactcattagacctacaacacttgaaaccactgacaatagcatgacaaaaaagccaggtaaataccaaaacatatctgtaaatgtaatcgaaactgcaagtagaaatgataatacacataagataccagaaactatattcatattgtttaatctcattgatgtcttcctttctgtaagatattaatcatattatatactatatttacatttaaatttactatatatcattatttttttaaatataaaatatcctatctaaataagagtatttttaattttgattgaatctctaaatatttttttaaaacaaagttaagaagtatgatgtataagatgcataaataatcaaaattaaaacgctcattgtcttttaattattttttactaaatactcatttttaatgagttatacaatttagatggatccatttattattgatatattatgaacatcaataaggttaaatatttcatcatatacagatatgtcttctaaaagaatataaaaatgcaccccaaaagttagattttaagtccaacttttggggtgcgtatcagttttaaaaataataatatatatttgttgtttaaattagtggaatctcataccgccatcaacaataatagtttgaccagtaatgtaatcagaatcactgctagctaagaaaccaaccacattggctacatcttctggtttagataaacgttttaatgtgatttgatcagtgaattgtttccaaccccattcttctggttgattattttcttcggctaattttttagcaataccttccatcataggtgtttcaacgatacctggtgcaaatgcatttactgtaatacctttgtcagctaaatcacgtgcagcaacttgagttaatccacgaactgcgaatttagtactactgtataaagataatcccgcattaccttcaacacctgcttgagatgttgcgtttataattttaccgccatgacctaatttttcaaattgttctaaagctgcttgaatgccccagaatacgcctccaacatttactccgataacttgattaaattgttcaggtgttactgtatgaataggtgttgttggtcctaaaccagcattatttacaactacatttaactctccaaaatgttctacaactttacgtgtcacatcaaaaacattttcacggtcggatacgtcagctctaaatgctactgcttcttgaccttcttttgaaagtgcttcagcagctttttttgcgccttcttcattaaaatcgacaatagcaacgttaaaaccgtcattaaataaacgttctgctattttgaaaccaataccttgtgctgcacctgtaacaagtgctacttttttagaattgtccatttactacacctcttaaagtaatataactttcaattattatgttagcactttgtatgtaaaatactatgaaaagtttgtgaacttttgaacaaagttttgttaatgattacttctttaaataatcaataaatcgtaataaagaggtttcattttttctgttgtcattgactatcgctgtaaaatacactgaataatcaaaaggatggcctagaggtatggcctcaatatattcgtcatttaaaatgggttcgtcttcgatcatgtaactagaaatcatacctacacctaagccttctgcaacagttcttaataaaacgatgggattatgcgtacgaaatacaatttttaattctccattttcttcttcgaattttttcaaatgatgatggtaaaaactacgatcatagaggataaatggatagtctttaatatcctctaaattaacagtatctttaaacgtaagtttagatttagcaggtacaataagtttaaaattcgtcgataaattaagaggaaattcatgaattaaggacattgttttatctgattcttttttaccaattaatcctaaatctatctcattatttctcaacatttttataatattttcacggtcagattctataacttcaatatctacgtttggataatcaactttaaattgagaaatgactttaggaagtagtttgtgaaataacgttggtatagtggctatggttaattttcctgttatatgtgtttgtaaacgttctacttctagcatgagatgttctttcgcttccaaaatttccaatatttttggaatcaatcgtttgccaatttctgtcggtattgtcccttttctggagcgataaaataatgaatatcctaattctgtttccagattagcaatcgattgactcatggcagattgactaatatgcatcagttcacttgcacgaatcattgattcttgttcgtatactgatttaacatatattagctgttcaaaattcatatgttctcctcccttatattagttttacttatattaaattaaattattctaattatacattaagtctagctaatattataataattaagtataaattaagataaataggattaaatagaggaggttaaacatgtcgcaacgtttatggtcaaaagactttatctttgtaacgattgtgaatttatttatgtatttaattcactacatgcttattgtgacaattacacaattcacaatcgaaacgtaccatgcttcagaaagtattggcggattagcagctggtgtatttatcattggcatgctagctggaagattaggcgctggaagaatcatcgatcatctgcaacctaagaatgtgctcattggcggtgtcattggctctattatagctatcgctttatattttacaattcatagtattcttattttgatgttcgttcgttttattcatggaattgcctttggtttctcttcaacagcaacgggtacgatttcttctagattaattccagaagaacgtaaaggtgagggtatcggttactacggtttaagcgtaacgcttgcttccgcttttggcccattcttaggactagtattaaataataatttaggattttcttcaatttttggcatcagtttgattagcattgtcgtttcatttagttttactttattaattaaaaaattaccgatgaatcatgacatagttactgaagaacaatcacgtcctaaaggtctcagtgctttcttacaaaaagaagcattgcctatttcatgtgtcgtcatcttagtaggaattgcttatgcaagtgtactttcattcttatcaatatacagtgaaatgttacatttagttactgcatctagtttcttctttattgtatttgcagttgtgacctttgtgacacgtccattcactggaaaaatttatgatcattttggcgaaaataaagtcatgtatcctgtacttctaagttttgcaataggattagctattttaagtatagtaagttctccatttttactattactatctgcagcatttattggctttggttatggaaccatcgttccaactgcacaagccattgccattcaacaatcacccactagtaagatgggattagctacatcaacgttctatatctttgtggactttggtgcaggcatgggtcctttcattttaggtctactcattccatttatgggctatcgctatttatatcttgcaatggcaggtctaattattattgcaatgattttatatttctttgtacatggtcgttatcaaaacagtacttcatcaaaaggttaatgtataaaaaaaagcgtgcgctcatttaacatgaacacacgctctttcgttattttcacaagattttcaagacatccatctcactaacttcagacaaccgtcagtcttaccttatttttttagtatcctattactaaagcaatagacatagcaacgctacatataattatccatattaatataggtttccatacaaacttcaaccattcagtataagaaattttacctacagctagagctcccattaaaattgctgatgtaggaaatagaatattacttattgcatcaccatattggaaggctaagacagtaagctgacgattaatatgtaacaaatcagagataggaaccattaaaggcatcgtcgttaatgcttgacccgaacctgatggaataaagaaattaagaatgaattgtaaaataaacatagctataatcactaatgacgttggtacatctgataataaggtcgtcaatgcatgaacaatggtatctatgattttcccattttctaacagtacgataattccttttgcgataccaacaatcattgctccaaatagaatatttttcattccatctactaaagcatcaaacgtaccattaaaccctaagccacctactaagcccgctaaaattcctgcaaataagaaattagcgctcatttcattgaaactccatccaaatttaaaaataccaaatatattgaagaggatagttgccataataatcattaaactaaatgcttgttttttactaaagtgttgataatcgatgtcttgattaacttgtccttcttctttttctaaatgatacacaatacttttagttttatcttttttaactttactagcatataacattacagttgaaatggccgttgctaatataaaaagatatatgatagttcgaaggccccaacctgaaaacattggaagttcagcaactgtttgagccaccccaactgtaaaaggatttaacatgcccccactaaaaccactagctgcccccaaaataaccatggcagcaccggttaatgcatcataacctaaggtacgagcaataataataccaatgggaacaaatataatagtttcttcagctaaacctattgtaaaacctaatattgaaaagatgatcatcgttagtggaatcattaaaaagttggcttttcccaaaactctcatagctttatttacaccattttcaaaagcacctgttttgtggacaattccaaaagcgccacccactaaaaatacataaaaaacaatttctcctccactaatcaatccttctgggacagctctaaatatattcaaaaaatttagatgttctgaagatactgtgtgataggtaccaggaataactatggtttgtccgtttttcttttctctcgcatattctccagcaggaataatataagtaagtaaccaggaaattactataatcaacattaatattgcataggtgtgcggcatttctagtttaaactttccagttttattctttttcatttatgtcatccccttgttattcattacataataatcaaaactcaaaatatatataatttatcataacctatttaaacaaaaatgataatattacatttttaataattttaaactttttgttttatataacaaaagccaaaaatcatatcatttttggcttctttttaataagtctgtctatatcaattttaatgttaaatataaacctagtaaggtcatgaataaaactggaagggtaataacgatacctgttttaaaataggtgccccacgatattttaattcctttttgagctaaaacatggagccataacaatgtagctaaagaaccaatcggtgtaattttaggtcctaaatctgaacctattacgttagcgtatatcattccctctttaagtacatcagtagctgctgattgatgaatggcaatcgcatcaatgagtacggtaggtaaattattcattattgacgagagtatagctgagataaaaccaacacccataatactagtaaataaaccttgatgtgcgatatttgaaaatatatgacctaacacatgagtaatccccacgtttttcaaaccgaagacaactaagtacattcccagtgaaaatataacaatattccatggtgcgccttttacaacttttctaactggaacggcattcgatttcgccgctaaaataagaaaaataaaagcaatactacctgcaataatagagacaggcacacgaacaaactcactcatcatataacctataagtaataaaactaatacgaaccacgatatacggaataatgaagcatctttaataactaattgaggtgccttcattttttttatatccacttgctttggcattgcctttttaaaataaagccacaatacaataatacttgcgattaatgaaaatatatttggaagtatcatacgacttaaatattctacaaatccaatattaaaataatctgctgaaacaatatttactaaattactcactgtaaacggtaaagatgtagtatccgcaataaaaccactggcgataataaatggaaatatcatcttttctttgaaacctaagtgacgtaccattgctaatactataggagtgagaataagtgctgccccatcattcgcaaaaaatgctgctactatcgctccaagtatcataatgaaaataaacatctttcgtccatcgccttgagatgcctttaccatatgaagtgctgcccattcaaaaaagccaatttcatctaaaataagtgaaataagaataatagccacaaatgttagcgttgcattccatactatactcgtcacttccataacatctgaccatcctactacgcccgtcagaagtgctacaactgcaccaataacagcagtaatcgaaatatctaatcctttgggttgccaaattacaaaaattaatgtgagtacaaaaatggtaatggctaaaaaagtcatcatctatcatcaccacttttatactttaaatactgccatgtattccttgaaaaatgaaatgttgtatttttatatttcatttgctccgaacctcctacaatcttattcatcgtatcataataaacagaaaaacgttgtaaaatgtcttaatttaaacatctcacaacgttttattaacaattcatttatttttcttctttcaccattttgccattttcatctaatttttgaatttttccgtgtttcattctatatgtacctagaatctcgccttttttgttacgatagttcacaatccagttaccattatgatctgtcattttgacatcatcccataaataacctgatttttttaattctacgtcatcaaaatcagaaattaattgatacacttcgttacgataacgcgtattgacactaccagatttttctaaatcatttgaagctaacggattcccattatcattagcactatcaggtaacgagtttgaaatatgcattttacttataagttctggtaaagctttattatctttattatgtttatatacttcttctaaactagcttcttttcctttatcaagtaaatcgttataatccaatgtacctttttgcatacgtcctacataaactgtatctttattaactccaattagcgcttgataggtacttttatctggataaaccgtaaagaactgcatatgttttggtgcatgttttactggttgtttcactttaaccaatgtaaaatcaactaatttataattatgtttgcccgtaggtaatctatattcataaattccagttagaatttcatttttagtcaatgtatattgatcgacaccatcaatacagaatgctaatgctaatcgttctttcgttgataatttagacgtattggttaatgacgtttcatcttttttatctgattcgttctttttagctttttgaacgttattttgatttgattttgatttattatcttcttttgaagattcatgcgtactacaagcagctaataacatcatcatgatactacccaaaaataaaaattttttcatctattggcccctcatacattcttcttattttactaatatactatacattatttatacattatttgaagaggaagataaatataaattttgttaaaataccattttttcataaaagttgtatcttatataattaaaaaactatgttacactgtgtacaatgtttcattattgtttatagtaattaaaatttaaaggagtttaagcatgaaaaaattctctgcagtcctaatgacaagcgctttattactttcagcttgctcacatagtaatgatgaaaatgaaaataatactaaacaaacatctcaaactaataaaagtgatgacaatcaacaaaaacataaaaaagttattaaagagggtcgtacatatatcgatggtattttaattgtaaataaaaatataggtcttccttcaaattataatcctggtgaagatccaaaagcccaacaagccttacaacaattatttagtgctgcacaaaaagagggtattaacttatacaaaatgagtggctacagaagttatcctactcaagttcaactatacaatcgttatgctgcacgcgatggtaaaaaagctgcagataaatatagcgcacgtcctggctactcagaacatcaaacaggtcttacatttgacatcggtggcgttaattcagataaaaacttatatgcaagtttcggaaaaacaaaagaaggtcaatggattgcgaaaaacgcacataaatacggctttatcgtgagatatcctaaaggaaaagaaaaaattactggttatcaatacgaaccatggcatttacgttatttaggaaaagatactgcaaccaaagtatatcaatctggtaaaactttagaagaatatgtaggattaaaataacttcgccacacatattattagtcaattaaaaaccatgagtgagaatactcctactcatggttgttttaatattaacttcattgtttcacgtcaaacatcatattttatctatttttactatccaaccaatcaatgatatctctaaaaatactttgattatatgacgactcattgaaaatttcatgttgcaaattttcataaatatacagagactttttcttagaagcaatttcattatataaatcgatagaatctttatagcttacgagaccatcttctttaccatgtaagatgagtactggatctataaaatggcttggatgttcttttagataggcaataccatccatcagggtaaatatgaggcctatagaaatctctttagcgactaaatcatcatctctatatttttggataatttcttcgtcagaacaaacaccgtcttccagttcatttttgacatatgtatctgctgaaatatttttatctggctctccgaatgtacgtttattatagcgcgttagtgcgccagaagtaataatgccatctactttattagggtatttggtaccaaataaagttaccgcgtaacctcccatactatgtccgattaaaaatactcttccactataattctccttagtgtagttaattatcctatccaagtcatcaatgatttcatccacatgactataaaatactctcttaccttcagaacgcccatgaccacgttgatcaaaacgaacgacattataatgatgctcatttaaaaacgcgaccaattcatcataacggtctagatgctctgcaagaccatgtgcaattataatatttgctttactttctttaacttcattaacttttgtatagagtttagttccatcttttgattctaaatattttatataattcatttctatcatcccttttatttacctttactcgtatctaccccttcgttaattagaataaacacatataaaacctcttaatattcttatttcgtttgatggttttcctcttatttttcccataataacatcactatgcatcaaaactttctaaaaaactcataactctatactcttaatatataaaaagcgtgctagtctttccaaaatattttcttttagactgcacgctcacttcattatttaattatagtattttctttttcatgtatcatttgaataatttcattattctcgttcataatcgctactttaggtgcatgatcattcaattcacgatcgtctaactgtacataagtcataataataacaatatcatctacttctactaagcgagatgcagcaccattgagacaaatttttccactaccacgttcacccgcaatcacatatgtttcgaaacgtgctccattattattgttgacgatagcaaccttttcatttggaaaaatatcaaccgcatctaaaatatcggcatcgatcgtaatacttcctacgtaatttaaattggattctgtgacacgtgctctatgaattttactattcatcattgttctaatcattttctttatttactccctaaaataatattatctattaaacgtgctttagaaaatttcacagctaaagcgataaaaatttgtccatttatttcattaacaacttcaagttcaggataactataaattgcgacttcgtcgatatgaccgcttgtatgttcttgtaagtatgtttttattgcacctacaagtatatgacttcgacgttcaccttctgcatacatgtctttggctaattttaaacttttacttagatgaaccgcttctttacgttcttcatcagtcaaatacacattacgagaactacgcgcaagtccatcatcttcacgtactatatcgacgccgacaatttcaataggatgattaaaatcttttaccattttctcaataattgctaattgttgtgcatcttttttaccaaaataggctttattaggacttacgatattaaataatttattaactactgtaacgacaccatcaaaatgtccaggacgttgtgggccttctaagacttcccctagacgtcccacctttaatgtgatgcctaattcatctggatacatctcttcaacggaaggatggaatacataatcgacatgaatagctttaactaaagaaacatccttatcaatttggcgaggatatgcatcataatcttcattaggtccaaattgtaatgggtttacaaatacactaatgactgtcacatcgttttcttcaactgaacgtcgcatcatacttaaatgtccttcatgaagcgcacccattgttggaatgaaacctattgattgaccagacgcttttatgcgttgtgcgattgtttgcatctcttttacagtattaattacttgtgtcatttttattaacctcatctaatacttttttcttatacgtatgtgcttctgcaggaaatgctcctgctttcacttctttatcatattgcttcataccatcaatgcctacagataaatctgcaaactgttttacgaatttagcataacgttctacgccataatttaacatatcgtgatacaccaatacttgtccgtctgtatctttacctgccccaataccaataactggaatgtctaattgtttactaattaatccagctaagtcacttggaatagcttctaatactaacgccactgcacctgcttcttgaacggcatgtgcatcacgaataagttgttctgctgcgtcttttgtaccaccttgtaacttgtaacccataacaccgacactttgtggcattaaaccaagatgtgcaacaattggaatacccatttgtgtcgattttttaatgaagtcagttaaatgggcaccttctgcttttaatgcattcgcattggtttgttgatataacgttatcgcatgatttaaatcatgttccgcacttacgcctaccgctccgataggtaagtctacaacgataaatgtatcatcggcgcctcgacgaacagctttaccatgatgaatcatatcatctaaagtaacttgagtggttgtatcataacctaaaactgtcattcctagcgaatcaccaactagaatcatatcaatattggcttgttgcgcttgttttgcactgggataatcgtatgctgtaaccattgaaatttttgtaccattttgcttcatttccataagttttgacaaatttttcattattttatcgatctcctataacattatctcaataatatcacgtataattatatgtaatattttaaagaaaggaaagttataaatgcgtattgcgattattggaccaggcgctgtaggtacgacgattgcctacgaattacaacaagtattacctcatatcacattacttggaagaacaaataagtccattcactttcaacctgcaaatcaacatgtcattgttaaagatattaagtctatgactaactccttcgatgtgattatcgtggcagtcaaaacgcatcaacttgaatctttagttccagacttaaaccgtcttactcatgatgagacaactattatcttagctcaaaatggatatggtttgcgttcaactttaccatttaaacatgtctaccaagctgtggtctatattagtggacagaaaaaagacgatgaagtgacccatttcagagattcccgtttgcatattcagcatgatcatcggactgaacaacttaaacgctatttagaatatactaaaatagaacttatattagaagatcacatagaaacaacgatttggtataaattacttgtcaatcttggtattaattcgattactgctttaggtggcaacactgcacaaattttaaaaatttcagaagtctatcaattatgcacacgcttattagaagaaggtaaacaagtcgctatggcagaaggtattacattacccgacacgattgttgaagatattatgcatatctatgctggttatccagatcatatggggacaagtatgtattatgatgttataaatcatcagccccttgaagtagaagcaattcaaggttttatttaccgtaaggctagaacacatcacctctctacgccatcgttagatacagtttatgcattattacggtctcaccattctttatccattcaatattaatgttaaaatcaatgtttaactattaatattttgtcaaattatatagtaacaaactctattacaagctatatcattatttttgaaaattttttcactttaataaaagggagatatatctttggataaagcaacacgtatacttaatattttgacattattattaaatggtcatgttgtcactcaagaagacttagatcgctttacaaatgtcagcaaaaaatctattcaacgtgatattaatacaattaatacatttttttatgaaagtcatttttggagaagcaatcatactaaaattgtctataattatcaattaggtggttatgaactcacccatgatactacgaacaaacaaagtcttggtgtactaagtttactcattaagttacaaagtctcacacctattcttcattacgatatttacaaatttttcttacatgcgctgtcgtctgtcagaatagaagataaacatattttgatgacgatgttacatcaattcaaagtacgtgatgatttacttcctggaaaacgattaatggaccttcaaaaagcaatcgtcaataaacatagagtgcgtattgaagtagatcataacaaaatgactattaaaccattatctattttgtatatgcattatgattattggtttacttacgaatttcaacataaaatacataccgtttctttgaaatcgatacaatccttacacgttctagatacaaaattttctaaagacttcgcgaataatgcagtattatttgaaatgagtacaaccatttggaatcaatttaaacaacaattttcaattaaagagattgtttcacgtaatgaagacaccattttggcatgggtaaattgcacacggtttgatgcttattacattgcttatcaacttgctcctttggcaaaaatcattgctccggaatcatatatcgatagttttattgagcgtttagatgaaattagacgtacttacacagaaaacaacagctgaccattaaaatcagctgttgctttttattaatcaattggatctccatgttcatcatattttgtcactataccgtcagaagtaacgatatatgagccaactaaatctccatttttatctaaaattgagaagccccaatctccgttttcatcttgttctggttctttatatgtgtacgtctctgtatctaattgatgaccttcataatcttctaccttatcaatgacatttgcacgtgtcactttttcagtagatgaagattcgtcagaagatgtattgtcagaatcagtatttaacgatgtttgacttcctgcaaatactatttgttttgctatttcttcataatcagaattattatatttatcatataatgtacttacatccaattctttaccgttatctcttaattgttgatagtttgcatcgtattgtgtacctgctacgagtactttatcgttacttactccaataactgttacaaaagctcctctcgaaggagatgcgctgtaaaataccattccagatggtgaaccattaataggataatccatagaagctagtttgtatgtatcaatatttttatgaattttactcacatttccttgttcaagataactatgatttcttaattcatttgcgttaatagcataatctgacactgaaggatcatttaaagctaacgctactttttcagcttgagataagttgtcgacattactatttgttttattttcatgttgattgttatcatttgaacttttattactatcttgttgggtattattgttatcattatctgaagtgtttttatttgatgattggttactttgtgatgtcgtatgttctgatttttcactagaattattgagcccaatcatatctcctaaatcacaacctgcaagtaaagttgtcgccgttatagcgccgatagctaagtaatgtttcttcatttgtttcgctccttttaaaataaaaaaatatataccttaacttacaatattaaacagacactgtatgtcgttatgaaaaagtacacacttcattatctaaagcatgtactttttatattaattacttaatatgttgacgtacgaaacgaccagcatatcctttaaacgattcgccaccagacatttcttgtttagcataagcatccgttgaaccacccattaagttatatccatatgttcttaagccatacatttttgtaaatgtactatttaacattggtgagcctgaagcacctgatctaaaaatatctttcgtttgaatctctgtaccatttgttgagaattgagttacacgaagtttattaaaatacgcttttgtgttgtcgttatattgccatggatatcctaatgaataaagtggcgaattgaatttcaattgtttaatctctgaatccgttgcaattttaactggtttcacatatttagacatattttgttttgtgtgaaccactgcaatatcatattgtggtactttaatcacttctgttgcttggaaaacatatggcatacgacttccatcacgattcatttgaaatttaatatatttcggagccgctgcacgaccatattgatcatcgataacatgtgcattggttacaaatgtatgtgccccaatcactgttcctgttcccatagaatcttgctttcttacagatgcatcgcgagagccttttttccagccatttaaattagatacacggccaatcgcctttaaattattttgtgaggcatttggatagcgttggattgaaatactgctgttactaatttttttcgcttttaaatacgcttgatatgatcctctttgtatcccgtcataataatagttggtttctacagctttagcctcttgatgttgggcagaatatcctagtacactggcaccaataacgacactcgctactaatgatttaccaaatttagattttagcattaatttgtcccctgctttctttcatttaaaaatgaattggttttatgtttaaaataaaatatgtacatcaatattataaaacaaacaaaggacagtatgcgtcttttttataaaacaatttatttttaactttaatgtacatttataaattatttacataaaaaatatttttctttacaaacttcaaaatatatagtatagtattaaagtaaaattatggagggatactcaagcctggcttaagaggctaaccattttatggttagtaggagcttttagctcgcgttggttcaaatccttctccctccgctatctaagaaacctaagattaaattcttaggtttctttttatttcatattttatatataagacactcttatttatttttcccatttataagagtacaatagttaagttgcgaaatgacgatacaccatattcatatatcggagtgaaaaaaatggacttttggtcatctaaaaaaggaaaaatgctagaaatatcaatacttggcatactaactatcttcggcattggttcacaatatttttcaaatttggcttatagtttaaatcaaggtattttacaaacatcatttggtataggttctcaatatctcattataccttctgtgattgctaactttgcctttgcacttggcgtgccacttggacatacattgacacacaaattcgggtttagacgtaattttttattctttgtaactctatttttaatcggctcgattatcgggcttttttctttcgacttaattattttatctattgctaaagggttacaaagtttaagtaccggcgtcttattcttcacacttttaccaaaactctttctcaacttccctaaacaataccgcaatgtattcttattaatggttattgtaggtttatttggcgcaaatgcattgggaggtctatcaggtagtctatctttagaattagatcgttggcattggatctttattattaatattatttcagctatcttatgtcttattttaggttcaatattcttaacaaaagaagaatatcaacattctgaacctattcatattagtcgtcctatgattatttcattagttcttagtacgattgctcttacgctaccgatggggatgcttacacaaaaagggtacgggtctctctgggtctggcctatcctaattatagcaattttattcattgtaaattttgtagtctttaatcatgaagcaaaacatccatttgttcactttaaaacgttattaacaaagaaaccacttgttggtgcaacaatggctatatcttcacatttagccttattatgtggtattgcaggaattaatgtgtatataattagaatcttaaaattacctttcactatatctttacacttttatttattctttttcataggtgtcattgtgacaggattgattaaaatgtttatctatagtgcagtaggagctggtgttttaggcacattaggctcatcagcgttactttatgtcagtattcattggatgattttacatgatatcgtaaatattcatttactttacattcaaggtttcctacttggttttggtgcaagtatgacacttgtaagtggtgctatggcaacattattagatggcgatttacttcaagctggtcagcgttctcaaacgatgcacacaatacgtaactacgcggcagcatttcttgttccagtgattgcctatctgattaaatataatattcaaaaaggaacacaatctgtttatacagaaaatattacaaacacttcaatttatattaagcgtataaaagatattgctattgatgctgatcataaagtatttctactaatgattattttcaattcgattatgttagtatcatcgattattcaaatgtctcttggaaaagggagacgtattacaccacctcgttcgcctaaaaaccccgagttacatttgaatacacacaaataatgatttttaaggaacagtttactttattagggtttcgctccttagtttacgatgttattacacatttcaatttcatatactcttaaaatgtatatttactctatgtaattgtgacagattattgacaacgctttcatatagcgttactatctatttacattcaatagacaacgttgatggttaaatctcgtatgtagctctgttctacatacgacaatttttcatcatatttgtaaacgctttctaaattgtcggttaagaaaggatggttactttggaaaatattaaagcgatatttagtaaactttttggatttattccacgttcaataattaatatttttatttaatctatatattttataacaaaaacaattaatagaggtgctatttatgaaaaaaagtgaaaacagatacagtattcgtaaattcagtgtgggtgcatcatccattttagtagcaacattgctatttatgggaggcggtgctgcacaggcagcagaaacacatcaggaagagggaaatcctgaatcagctgtagcacaatctattggggatcataaaaaacaatctgataatcaagaaacacaacaagacaatgttcaatctgacgaacaagctacttctacatctcaatcagtaactaatgaaaatgaaacacaacgcttacataatgaaaataaaacttcaactcaagttaaagatgatactgatcaattaaacactaatgaagaaacaattgaacataacctaactgatcaaactattaaacatcaatcaaatcaatctgaagacgcattaactaaagaaactccttcagatgaatcacaatcatcttcaacaaaagagagcaaagcgttttctgagcaatctcaaaataatactaaagacacaattcaaaaagacacagtcacttcagataaaaaagataacacaactgaaacgtcaactactaaaaatcaatctcactcttcagacaacgtgacaaatgaaagtccgacagaagagaaaacaacaactcaaacaacgactgctgaaaccaacacatcatctacaaaagacaatacttcaaaaacaactgacagtcattcaacaaaaacatctcagtcaacacctctaacagagagtaaagaattaacaccatcaaaaactcaacaagattcaaatgtaaatcaggatgcaataaaaaataatgacgtagaggcgccgtctactggaaaaacaaatgatactgtagacacaactgaaacacaacaaacagtgacagctaaacaaccaacagattctactacacctacagagaatactttaaacactaaagatgaagcgatctcaattgatggtacaacaaatgaaactattggacataaagatgctaaagatcaaaaaaattcacaggctggcttagagacattagctaataatgcagtagcaacaacaaataatacatctcaacagcaaggtacgacagaaacaaaagatcaaaccaataaagttgctaaacaaggtcaatacaaaaaccaagatccaatcattcttgttcatggttttaatggatttactgatgatatcaatcctaatgttttatcacattattggggcggcgataaattaaacattcgtcaagatttagaacaaaatggttataacgcttatgaagcaagtatcagtgcatttggtagtaactatgaccgtgccgttgaactttattactatattaaaggtggtactgtagattatggtgctgcacatgcagaaagatatggacatgaacgctatggtaaaacatacgaaggcgtttataaagattggcaacctggtcaaaaagtgcatctagttggtcatagtatgggaggacaaactgttcgtcaattagaagaattattaagaaatggtagtcaagaagaaattgaataccaaaaaacacatggtggtgacatttctcctttactacaaggtggacacgataatatggtttcttcaattacaacattaggcacaccgcataatggtacccacgctgcagatgaattaggaaatgaagcacttgttcgtcaagtggtttttgatttaggtaaacgattaggtaataaaaattcacgtgtagacttcggtttgtctcaatggggtctaaaacaacaacctggtgaaagctacatctcttaccttttacgcgttaaaaactctaaattatggcaatctaaagataatggtttttatgatttaacacgtgatggcgcgacagatcttaaccgcaaaacatcacttaatccaaatatcgtttataaaacgtatacagctgaggcaacgcatccgactttaataggaaaacaaaaagcagactataatatgttcttaccattcacagtgacaggaaatgtgattggtaaagctactgaaaaagaatggagagaaaatgatggtcttgtatctgtgatttcatctcaacatcctttcaatcaagcttatacagaagcaactgatacaaatcaaaaaggtatttggcaagtaacacctactaaacacgactgggatcatgtcgattttgtaggtcaagacagtacagatacaaaacgttcaagagaagaactacaacagttttggtatgatttagcagatgatttagttcaaacagaagcgctaacttcaactaacgaagcttaatataattttttgcggaaaggtggttgtctaatgtctggtgatgtctttcaattacttggttctttcttcagaatagttaaagcattatttttctaatttcatataaataaaagcacctccgaatgagatgaagacattttcactcgttaggaagtgctttttattatgtaagatttgtaagaacatgatgtcataaagtgctgtaagtttttcagtctagttagatgaacgtacatctacattattatcgtttgacgagaatgcttcttcatttgctgaaagtgtgatctttttagagtggttagaagctttgacttcatgacgtaatgcactattcaatcctaataaattatttgcttgagtttcttcactattgtagctttctaatccattcacaatttcagtcgctaaatattcacatgcatcttgattgtcaacttcgactttttcattgattattgattcaattacttcaattaagtcacatttttgaatttgaatatcaatcatttgttctactcccttaaactgtcattaagccatttgataggctttctagtttattaccctgtttctagaaaatgtacacaaaatcgtcactgtcgaaaaatgtaatgcactactgcgtccattttattactcatcgttacttttaggaataaataccttcgcttcactatcttttggataataaaaaccattaggtacagtttgaagttcgattaagcttccccatggcgctcgaatataaacggttttattattctctgtattctcatatcttgtattagaatgtggttcagatagtggctctcctcctgcctgtttgacacgttctaatacatgttcaaattcgtcactttcaatataaaaagaaatatgtgtaaaacctatatcttgtagtgattgtggttcatgttgttgagcgtgttggaattcaaacatttcaatattaggaccacaaccaaacaccatcatgcgtttatgaataattgaagttcctttttctagccctaagatatgctcgacatattcgccacctcttggttcatcatttttagtttgactatcatatgcaatttttccatctagtccctgtttaaaaaaagcagtggctttttcaatactaggaaccgtaagaccaatatgattaatacctcgattcatcatatctcctccttactcaaaagagtgcaagacagcattcattttgaatttatcgtccactccagtaacgtatctccaacttgtgttgattgaaaagaatttggaacaaacgcatgttcaattcaatcatcgactgccaatatattaaaaaagcctaagacaacgcattatgtctcaggctttttcaaaaacttattcattattttctatcgaaatatctgtaacgtttgaatgcgtcaaggatagcttgtggttcgctagagactacaacaccaggcgcatctaaatcaatacgattgctttgtaatacatttttcgcttcttcagtgattacaacaggttttttatgattataactcatttcagcaaagtcaatagcagtcggtaacatctctttaccatctgaaagaacgattacactatcaaatactgttgaacttgctgtgctataagtttcagtaataccaatttcatcatcattaagatttttagctgtttgtccaacaaatgcatagtttaagtcgttgttaacaaatacttctgcatatgattttaatgtttcagcgctaatatcaccatttacaagcactgctacagagtgtccttttaatggaatatcaaatttttctaatgttaattggctatctttagcatctgattgcacttcttcattttctgctggaacttctacgcctacattgtttgctacgtattcagctaatttacgatcaactttattaatttgattaacagcattttgttttacttctggtgatttacatttaccaatttcaaatgaaaaggcatcggctaaatgttgctgttctgcttcagttaagctgtttttatataatttagcttgagtatagtaatctttgaagctatcactacgttgacgtactttataaccttctactttttcatgataatgctcgaaaccaccttgttctttaggtgttgtatgagggttattattgttcaagccatttttatggtaggctgtttgaccttgatgaatatatgattgatgcattgcatcacgttgattattatgaacttctgcaactgggcggttaataggaatttggttaaagtttggtccgccaagacgagaaatttgtgtatctgtgtaagagaataaacgaccttgtaataatgggtcattagagaaatcaatacctggaacgatatgcgcagggtggaacgcaacttgttcagtttctgcaaaaacgttatctacattacggttcaatgtcattttacctacgattttcacaggtacttgatcttctggccataatttagttggatctaaaatatcaaaatcaaagtcaaattcttgttcaggtttgataatttgtaagcctaattcccattcaggatagtcacctttatcaattgattcatataaatctttacgatggaaatcaatgtctttaccatgtaagatttgtgcttcatcccatactaagctttctaaaccttgtttaggtttccagtggaatttaacaaagtaagattgaccttctttatttacaagtctaaatgtgtgtacaccaaaaccttcttgttgacggaagtttttaggaatacctctatcactcattgcccagaatactgcgtgcatagattcaggattttgaccaatgaaatcccagaatgtatcgtgtgctgaaccaccttgtggcatttcattatgtggctctggttttaatgcatgtacaaagtcagggaatttaattgcatcttgaataaagaatacaggcgcgttgttacctactaaatcgaagttaccttcatcagtatagaatttagtagcaaaaccacgaatgtcacgtactgtatctggagatcctttagaaccttgtacagtagagaaacgcacaaagacaggtgttgttttttcagggtgtgttaagaaatccgcacttgtatattcacttaaatcttcatacacttggaattcaccatgtgccccaaatccacgagcatgtaccacacgttcaggaatacgttcatggtcgaagtgcatcattttttcacggaagtggaagtcttctagtaaagtcggacctctatcccctactgtaagtgaatgttcatcttcacttactttcataccactatttgtagtcattgctgtaccatcattattttttcttaactcatctaattgttgttgttttttgtttttgtttgattgatccatacttatctctcctagatatagattggtatcgtaaatacattgttatgtacattgtttccttattacggaatacagttagttattcccatttataaaagaattaatcattttaaagaaaaaatatattcccataaatttttatttaaagaactttcttttataatcgtttatggaaatatattttttgatattttatattaaactttaattattgataatctactaccttatcaactggcattctatatgatgtatgaggttctttttctttcttaccaatcgcaacgattaacactggaacgtaacgttctaaatcatatccgaatgcttcgccaattttgtcatgctcaaaaccaccgatagggttcgtatcatagccatattgttttgcaactaacattaattgcatcgcagctaaactactatccacttttacgatgtcactcataacttcacgtgaactatttttgtaagtatccattacaaaaggtaatatttggtcttttacttcttgaggcatatgtccttcttcaactgctttgttatagatgaattcgccttcctcataacattgtaaatcaccaaaaataacaatcatcgctgaagatgtatcattttgtgatgtattaaatcgaattaacgggcgtaattttgctttcgcttcatcactttctacaacaacaaaacgccatggctgcatattcactgatgaaggtgcttttgttgccttgctaatgatttcattcatttcgtcatgtggaattttataatttggatcaaatcctttaacagattttctactttctaatatttcgttaaaatcgttcattcatttccctactttcatattttaattacgtaacttagattattaaataaattgaaaataaagagaagtaatttgcttatagatttaaaaagatactcaatttaatacattattaactatatttaataatgtattaacacttatctattaaactattatttgattaatattaactaaatagggtattcttaaacttaacaaattaaataatttgaagttttaaaaaattatttatgttataacaaagggtattggattcagtcataaagtttcagtcataaggttactcatgaaagggaagaaaattatggcagaagataaactgcaaagagagttaagtaatagacatattcaacttatcgctattgggggcgcaattggtacaggattgttccttggatcaggtgaatctgtacatttagccggaccgtctattttattgacttatgttattgtcggttttgtattatttatgtttatgagagcaatgggagaaatcctcttatcgaatttaggattcaaatcatttggggatattgcccatcattatattggaccaattgctggatttatggtcggatggacgtattggttaacttggattatttcaggcatggcagaagtgacagcagttgctaaatatgtttcatattggtatccaacagtaccaaactggctaacagcggcatttactatcttagtattagtcgctttgaacttattcagtgcaaagctatttggagagttagaattctggctgtcaattattaaagtgataacaattgtagccttaatcattgttggtattgtgatgattgtgcttggaatgaaaacctcttacgggcaagccagtgtaacgaacctttggtctagaggtggatttttcccgaatggtattcaagggttcttgatggcattccaaatggctatcttttcatttattggtattgagttaatcggaattacagctggagaaactaaaaacccacacaaaacgattcctcaagcaattaacaatgtacctgcgcgtattttaattttctatattggctcattagcagtgattatgtctgtagtaccttgggacaaactaaaccctgcggatagtccttatgtaaaattattcggactgattggtattccatttgctgccggtattattaactttgtcgttttaacagcagctgcttcatcatgtaatagtggtattttcgcaaatagtcgtacaatgtacggtttagcaggtcgtaaacaaggcccaccattcttgcataaaacaaataaacatggtgtacctcactatgctattttagttacatgcggcttattaagtatttcagttattttaaatgcagtatttaaagatgcaacaaaagtgttcgttcaaattacgatattttcaacagtattgaatattttaatttggacacttatcatgattgcctatctaaattatgtcaaacgtaatcctgaattacacaaagatagtaagttcaaaatgcctggcggaaaatatatggcatttgcgattctagctttcttcgcatttatctttattatcttattaattaacagttcaactagaattggagtattatttatacccgtatgggcaattattctttggattatgtatcaaaaatataaaaaagaatcagacaaagcgaaagttaaaatggaataatataaagaacattttagacttccccctaatggaggaagtcttttttcatgatatctattaaataaaagagaagcttaattatagtttctctgtatttatatttaaatggtcttttaacatatgactttcatattcttttctaaacacgccacgcgcttgaagaactggaatgactaaatcaataaatttttcaaatgcgtttggatatgttggtgacattaacataaaaccatcacacgcttctttttcaaaccattcaatcatttcatccgctacttgttccggtgtccccactatcgttttatgccctacccaagtaccaaatcgatctaatacatcgcgtaaggtaaggtgttcggtcataacagcacgctgtacagcttcataaacagattttataacttttttctctaatgcatcataaggtggcaatgatggcacaacttcatctagtgtccattcacttatatctagaccaatggctttagataattgtttcttgcgtttttcaagtgggatcatatcatctaattgttgtttaagtttataagcgtccttctcattctcatcaacataaacggtgagacctggtaatacaagaggtggttgacgattttcttccatggcacgttgatgaatgtcttgtctgaactgttggccatcttgtaaattccatgcaattgaaaaaatagcatccacgtgtcgtactgctaaatcacgacctggaatagaagttcctgcttgaaataaacgtggtcgaccatattttggtgttggaatgttaatagctccggcaacttgaaaatactttccttgataatgaagtggatgaatatattgatgatttaagccaattcctgagtttttgtgattaacgatagcctctacagtaaatgattcccataattttttcattacattaataaattcatctgctcgttcataacgtttttcaagatgtggtaaagcttgcatcgagtagttttgtgcttctaaatcaaattgagatgttacaatatttgccccaatacgcccatgagatatttgatgtaaacttgaaagcatacgtgctgcaagataaggttcataaaaagaagaagaaatggtacctatcaaaccaattgaatgtgtttcacgtgaaatggcagcaagcgccgttagtggttcaaaataataagaaatatgtcccgtttcttctccagatatatattgaccatcacctaagaagaatgcatccagtttacctttttcggctaatttcgctaacttaatttgaaaatcaatatctccaacttcttcaacatatgaatgtggtagtctccaagaggcaggatgtagacctgtactataagctaaaacagataaatgcatgtgtttcattgtcattaacccctttgttataagtcaaaattgtcattttaatttgcatatatcgtatatgaattgttgaaattttacaatatctactaactattttatatcttaaaataattatatacaatatcatctagttgtttagcaatatgaataaaatcttgatttaaatccaatgttttgacactaatcgtattgccactcatctgaaacgtattatcaggtacaagttgttcatccgttttcgcatacaataacatccccgcaacatttatctgtttcgattttaagtgaaatgcttcattttttacatacgcaaatatttgatataaatttccagaatgaatcgttcttgtatcaaaatactgttgtaacgtcgacgtataatactttgtatcaataattaaacattgtttcccataagtgagcatgacatcacttctcattgtcggtaacatgtgacgataatcatcatcagtggcccatggaatatgagacgcggtgacttttaactgtggaaattcctttttataataagccctaacaaaccgttcatataaacgcgccatctgttgttcatcttcgaacatcatcgtttctcttgaaccgcttctttctgactgaattcgtccttgcgtaacaaggtaacaaatagccattaacatacgatatgtttcgtgatgacgatcaaatcgtaactgccaatcaatatgtcgataatctaatatatctacttgttcaaaatatatcagcagtcgttttaacgcttttttacgtgtgcgcgaaatatctaattttagaacattaagcattgttgtttttaaaatttgattcatatacgtattaattgaaaattcatcatacgtgcaatttaactgtttatgcatcattgttccttgttgtatggatgctgtgacattaatctttcctcgtatcacattaagcgagtcattgtgttctaaatagtcatgttgaagaccatattttaattgactcgatacgcctttaatcaagagcgcactatataaatctgccacattattaaatgattctgttgctatatgttgatagcctttcttattcaaaactgtaaacgcgtaagacaacatataataaatattatgaatgttaatcattgaatcgcttcccttaaacgtaccttccaactatccacttttgaagggtcgtcaaaccaatattcttttaataatggtatcatttcgaattcaataatatttgataattcagactctgtgacatcaaccatattactgaaataactatggccaataacgaacccctcacctaacatatcatcatctcgaatgtcgacattcagtgcttgaattgtatcaattaatgcatcaaattgtggattttttaaattttcttgataatgtttaaattgtatggtttcaaaggcaggattcatatcaaaaaatgcaaatcgacgtcgtagtgcataatcaagcatggctaagcttcgatctgctgtattcatcataccaataatataaacattatctggaacacagaatttctcatctgcatagagtaattctatttccattcccctcttatcattttcaattaacataaacaactcaccaaatatcttacttaaattgccacgattaatttcatcgataataaagaaatggtctttctcattatcttcttctgcttgcttacaaaaattgtaaaacgcaccggtacgcaattcaaagccagtttcagtaggacgataacccatcacaaaatcttcatatgaatagctttgatggaattgtacaagtttcacacgttctttatctttaacacctatcattgaataagccaatcgtttcgctgcatacgttttacctacgcctggtggcccttgtaagatgacattcttttttcttctaattaattgcacaagcgtgtcatagtcttcttcattcataaatacgtcgtctaagaattgttctgctgtataaatgggataagtcgtttgtgtagcaaccactccatcagaatgttcaactgaaaataactcattaaatttccgaatcgtttcactatatggcgtaattttagtgagcgtcttatttaatgttttgattggaatcttccagtttcctttctccttccaaacaagctgaatgatatttttatcatttttatattgatgattggatgaaacaacgccccatcctacaatatcagtctgtccttttttcacataaacaatatccccacgtttcatttctttactaaattcccatatggcattaaccgtatgaatataatgatgctgattatggttcaattgttgtaatttttgattaatctcttctttagatgcatatttcgagaaatcttctaactcgttatatccaatagacatttctccattctcaataaaagaagcaaaatcaacatcttgtggttttggagaataaatccaataattcacgacttctaaatccttatctgcatcgatatcttttacttttgaactttgcttgacttcctttgatttgcgccatgcttcataacttaaatcaataaaatcattcaaatagttatcctcttttaaaaataattttaatttttcaatcatcattaaatacgtggtcgcagttaatgattgttttaagttaacctcaaaattgatatactttgtactgatttcgctttcttcaaaaatataccaaatcgctcgagaatctaaattggcaaatgtgtcagaatcaatccaaaataatccactggttaacttacccataccgattccaggctgagccatcacttgattaaattttctcttaaagttattttcattatcttcacttttatctgctgaatacaataaagcaatttcaaacaacgaccataaattttcaatatcttgtgcttcacgatcattcttaaaattataaaatgtagcacgtaaattcatcactgtcggaataccatcaaaattttgtggtatatctgctttcacatcaaatagtttggccatttcttctataattttaattctattttttttagtcatagaactcttattaaataatccaaacacagtaaatggatccatatctatcatttcattattaatttctaatttaggcatattgatttgagtgttaatataaagttcttgtattttctcaatcaattgatcacgacaattttgatattctaacaatttatgagctaaggctttataaaagattgcccatgttttatctattttatagtccatctttatttctcctcaaaattattattatcttcattttaatgcattttataaatatatttatacctttaaatatataaaaaaataagctataagatcgtatgatttcaacttcttatagcttatagtaaatggcttaattatgcttgaacttcgtgtttgttgccacgaactttatagacaataagtccgataataaatccaattaatgctgggacaatccatcccataccaatatcaaagaatggtaaataattctcagcaaaaccgattaatgattgtgcgaagttcgttttcacaaaaggttctggactcgctttaataccatcaaaaaatgcagcaatcactgtaaataatgtagtaaagcggtacacaattggcgaattattaaataaatgacttactaaggttagtaaaatcagtgtaatggctaatggataaataaacattaatacgggtaatgagtacataataatttttgttaatccgacattcgcaaatataaacgccaatacactaaccatagtggctaatacaatgtagttcgttttaggaaatagttctgtaaatgtttctgaaaaagctgtaattaaaccaattgccgtttttaaacacgccacaataataataagtgataaaacaataattccgaaatcacctaaataatgttgggcaatttgtgcaagggcaatgcccccattttcacttactttaaattctccaagactcattgttcccattactgcaagaagtgtatagatgacacccatgccaataatgctaatggcccccgatttcactgtttctttagcaatatcattaggatttgtaatacctaattttttaatagtcgttacaataatgattccaaatgctagtgatgccagtgcatccaatgtattatacccatcgataaaaccttttaataatacactcttattgtagtcaggacttattggtgcatgacttatactgcccattgggtgaatcaatgcaagtacgaccacgatacctaataaaatcaaaaagactggatttaagaacttgccaatatagtctaagattttagagggtttacgtgcaaaaaaccaagctacgataaagaacaacatactaaagacaggtaaaatccattttccactgcttggagaaacaaatggtgaaaaagcaatttcatatgatgttgttgcaagtcttggtaaagcaaagaagggtccaataacaagataaagaccaatcgtaaatatgtatgcataaattttacttacgcgtgaagaaattgcaaatacaccattcgtcttagaaataccaatcgcaataattcctaaaaatggtaaaccgattgctgtaattaaaaatcctaaattcgcaagtaatacgtttgcgcctgccatttgccctagatgaagtggaaaaattaagtttcctgctccaaagaacaaaccaaaaagcatcgacccaataaagagattctctttaaatgtaagtttctgtttcattgtctttcctcgtttccctcttaaagtcataatagatattatacatttttttaaaatcaatttctttagaatttttaaaaaagttagataataatatataaaaaaacttctctttgcatgattacattcattttttatgcaaaaagaagttttaagtgtaaccttatactcatcgatatttatccttaattatataatttttagttatacagacttagctaatatatgtatctgcatgttcaaggcgatatgtttcaccttttgctttagcttcttcataagcttcatatgttgtatgtttaacatcttcaactttgtaatttaccgttttcgcaaatttccttacatcttcttcatttttggccaatacaaataccgttaaaatattgtcatctacaatgtctttatggtgttggtaacgtagtctataaatattcatgacgctgtctccttccaatctattagtgataaacccttacttcataaaaataataaataatgccctacatattatttaaatttaatataccacttttttttgaaaaaggaagcctataaaaaagaagtaagatagaatttacttgatcttcatatcttacttctttactttaatatactttaattttaagattcattttttaaagctttttcaatagctttaatatttttcttcataaatgattgatacgtattactgtcattatcttgttgtttagtatgagaacccatattataaaatgaaattgtttttgcatgtgtttcttttctaaccgtgtctgcaactttattcgacacattttcttcagctaggatatagtttaccttatcctctttaatttgttttacaatagttgtaagatctttttgacttggttcttcagcattcatattttcgattccttcttgcttaaaaccatagcgatcagctaaataaccaatagaatcatgtgaaatatatactgttttaccttcttgacctttaacagcacgtttcatatctttatctaaatccttcaaatcactaactaattttttataattcttttcatagtcatctttatgtttagcatcttttttaactaattcatcctttatatctttcgcaaattgttgacttaatacaggatctaaccaaacatgaggatcatatttaccatgatgatgctcatgttcttcgtgctcgccatgttcttcgtgttcaccgtgttcatgttcatcctcttcgccttttaacaaatcggctttatttaaagatgattctaatgataatgttttatttttatcattcatcgcatttgcaatttttttagcgactgggtctagattatcccctgtatatacaaataaatctgatttaccaatatcgaccatttgtttttgactcggctcatatgtatgtggatccattccattcggatagactgattcaacatgaacgtatttaccaccaatttgttgagcaaaagatttcagtggatatactgtcgtttttacctcaagcttttcattgttctctgattttttatctttatcactaccactattggatgttccacaagctacaagtgacaacgttaaaatactgatgaagactaacattaaacttttcttaatcattttcttctctcctaaatcgtaattattacgttttaataatcgcatttcatatcgaaattgtcaatggacgatttaaaaaaatgaaaatgattaaataattatatataattgttgttttactacagtcagaaaaaggaccgaaagttataaaaggatttttattatgaaaaaatttcttctagataaataaggcattattgaaacatttaatagcaaaagtaaagtaatgcctgaaacaatgagtggagaatgtattgctataaataaaattaaaaatgatcaacatatccatattactgaacctaaagaaccaactgttaagttaacaatattaagaaaaatgatttcggacaactttaatatataagtaacagagtgaaacagaattcccattaaattcagtgtttcgctctttttcatctcaatatttctatgattattaactgtaattaatagttttttgaaaattttgtgtattttaaaatgtaactcctaaaataaagcgctttcttgttaaaataatagtgtaactattttaagggggacgatgataatgacaaaggggaatcaaatcactaatcaatctaaaaaagaaacatctaataatggatataaaccattatggattgtgattagttttatcgtattagtaatgattttattattacctacttcaagtagcttaccggtcatggctaaagcagcacttgccattcttgcttttgctgtaatcatgtgggttactgaagcagtatcttatccagtttcagctactttaattttaggacttattatattattacttggctttagtcctgttcaacatctctcagaacaacttggtcatcctaaaagtggaaacgccattctgaagggaagcgaattattaggcacaaacaatgctctgagtctcgcatttagtggtttttctacttctgcagtagcacttgtgaccgccgctttattcttagcagctgccatgcaagaaaccaatcttcataaacggctagcactttatgtcctttctattgtaggaaataaaacaaaacatattgttatcggtgcaattttagtatcaattgtattagccttttttgtaccttctgctacggctcgtgctggtgctgttgtacccattttactcgggatgattgcagcctttaaagtgagtaaagatagtaaactagcatcactcttaattattacatccgtacaagctgtatcgatttggaatatcggtattaaaactgccgctgcgcaaaatatcgtcgctatcaatttcattaatcaaaacttaggctataacgtgtcttggggtgaatggtttttatacgctgcaccgtggtctatactgatgtctattgccttatatttcattatgatgaaagtgataccacctgaacgagatgccattgaaggtggtaaagaattgattaaacatgacttaaacgaactaggtccaattagtgctagagaatggcgactcattgtcatttctatcttattactgatcttttggtctaccgaaaaagtacttcaccctatcgattcagcaagtgttactctaattgcattaggtatgatgttaatgcctaaaatcggtgtgattacttggaaaggcgttgaaaagaaaattccatggggaacaattatcgtctttggtgtaggcatctcacttggtaacgttttacttaaaacaggcgctgctcaatggctcagtgataaaacatttggattaatgggcctaaaagggttaccaattatcgcaacgattgcactcattacattattcaatattttaattcatttaggctttgcgagtgcaacaagcttatcatctgcattgatcccagtatttatttcattaacttcaacattaggtttaggcgatcattctatcggtttcgttttaatacaacaatttgtgattagctttggattcttattaccagtgagtgcaccacaaaatatgttggcctatggtacggatacatttactgttaaagatttcttaaaatcaggtatccccctcactattataggttatattcttgtgattttatttagcttaacgtattggaaatggttaggattagtgtagaataaagtcagattaattttatagatagagaggtttatcatgaccaaaaagaccatttattttatttgtacagggaattcttgtcgtagccaaatggctgagggttttggaaaagcaattttaggtgatgagtggaatgtatattcaggaggcattgaaacacatggtgttaatcctaaggcagttgaagccatgaaagaagtgggtatcgacatttcaactcatacctctgatttaattgatgatacgattttaaaacagtcagacttagtagtaacattatgcagtcatgctgatgcacattgtcctactattccatcaggtgttaaaaaagaacattggagcttcgatgacccagccggaaaaaattggtcagaattccaacgtgttcgagatgacattaaaaatgcgattgaacaatttaaatatagaacataataaaacagcagtttctacgtatttgacgtagaaactgctgtttattgatatagccattgcttaccaaaagtcacttgttacaatactttttctctcgatgtctaaatttggaatgtccctctcattcgcaactgcatctttataatttaaattaagcacctcaatggctttatcaaacgtcacattatctttacacatgtactcccatacagttttattgatgtactcattaccatcataataaaagtctttcacccacattacttatcatccctttctatttattacagtttgatattacacccaaagtgtaatgtaggcaaatcttaaataattagaaattattaattatttatccgtttatatgatgataattaaatgaatttttggtcataaaaagttattataaaaaacttatgaaaaaaatttaaaagcctattattataaacatttgtttatttttcttcatcttctaatttcacaagtgttggtttaggcgtatgaatgcctacatcgttaaagtaacttatgatttcttttcttaataaacgttggcctggaaaatgcatgcctggtttaacatgagctaataatttaattaccatttcattaccatcaatactatctaaaccgagtaaatcaggtgcagcaacgaacatatcatatttatcttgtaatgttggtaagaatgcttttaattctttttcaataacgtcataatcttcatttggagaaatcggaattgcaataagaggcgatacatctgtcttagaataatttacaatttcactaattgtcccattaggtaaggtatacacttctccagtatcagattgaatacgtgtagatcgtaaacctattgtttgtactgtcccttctgcaatcgttacacctgacgaattaatttgaacataatcgctgacgtcgaattgtccttcaaaaataacgaaaaagccggtaatgatatcttttacaacagtctgggcaccaaaaccaactgctaaaccaacaacaccagccccagctaaaatagctgagacgctaattccaaaacgagagagaatcgatgtaagaacaataaaccaaacaacataactaattaagttttgaacaagtgttgaaagtgtctcacttcttttaattttatagcgtgtcttcttcttctcattgactttaaaaaatttcgttactacttttctagaaattgcaataacaatcatacctaataagatataagcaacaataattaaaatattggctagtaaattttgataaaattctatcttcgtcaatggttcaataaatttaataaacagttgtttcatttgactcatgttgatataatactccttttatacttagatttttaaatgattgtgcgctattatttagaacacgacacttaaataaaaatgataccatattttatatattatctgaaataatcatttgctttattccagaataaaaaacttcatcctcactacttcgtgagaatgaagtcatatattaaatcattattatttatggtctgaactttcaaaatatcgtcttctaaattctggggttgctacttttgattcaaagtcttctggaatttcttcagtacgtacgactaatacatcacatggcgcatgacgtacaattgcttctgatactgaaccaatcataaaacgttcgactgcatttaagcctgaagcaccacacataattaaatcaacattcaattcatttgctaaatttttaggaatgagtaattttggtgggccaagttcaagtcgtgtttctacatttgtcacgccttctttaacagcgagttctttatagccttcaagtaatttctcagaatactctttagacggatcgaattgagatgcgtacacttcataagcggtatatgttcttgtatcaatcacatgcacaatcgttagctttgcatcattacgttttgctacatcaacggctttattaaaggcccattctgcttcgtttgatccatcaactgcaattaaaatgtttttgtatgataacattttaatctcccccttatctgttctcatctttattttagcactatttcaaaaaaattagtattaatatgtaaagcgctttcaaaatttatatcatacgttcttcgctatcaatttgatactgtaagtaggataaaatagcgctataacatcctaatgatatcgttaaaacaaatggtaaaagtttgattgataactctcgggtatgtttagaactcgttaatgttaaatgatcagttaaagcttgcatatctatatgactaaagcttgcataactaataattacaaaaaaagttaacatcgccattaatttcattttatttacaaagtcactactaaactgaatcattgaaaaagctaaaataagaataataatattgaatataacactaaaaataatccacaacataataaatgtcggatgatttaatttccccatgtttaaaatatttccttcgaccattaaaggtattaagaaactaaataaaattgaaatgctaaatgtaatgatcattgttagtaatgcccctaacagatttaaaaattcccgcataatatccaccttttaaaagttaatatattaatattgtacaatttaatacatttatatgctatattcatcaaaatatttaattaactattttcaacatcaaccttatactaacttacagtgttgtaattttagaatatcttacttactatttattttattatatgtttttatagaattgaggtgatcatgatatgccaaatgaaaactatagagaaaatgatattttaggaggcattagctatttaagtgtcttctttgcaccagtattatttccacttattgtatggatcgtcgcacaaccaccagcttcgacccatgctagaaatgcgttattcaatcacatcatgagttgggttatggtggtattaggactagtaaccctatctatttccccggcttttgtaaatagtgaacgcggtatcggttggatcattgcaatcctcatcgcagttcttttctttatatgggcacttgtgctatttttaaaaaatatcattagaggtattaaattaatgatgccataaaaaaaaaaagaggaagtgacgataatctcgtcgtttcctctttaattttattaatctcttgttgtatgaaactaaaaaatgatcaatcaaatattttaaactttatcgttttcagtataaaaagcaatactataatgttgtttgtgagaattatatatatacttttattccattatgattgtctactgtaattataataaggtttggtcgttttagtattagattgcgcttgcaatactatattacgaaaagttgtatgatgtttatatgaaaattgtaatacatatttttatcatcataacttgtttaatatccattatttcttaaggttttcttattttccaatgataaggatcttcaagttgataccaatcagaattcatttcgctactatttagcaggcattcatcgagttttttttcgattttttcttgatctaagtcggtaccaataatgacaaattgtgtatttctatccccatattcaatatcccaactttccgctacgtcacgacgttgagcaagtatctcttcacgtttttctttaggcattgatgcaacccaatatgtaactgggctgatattacatgacgatcctgcttgtgacagtaaacacgcaacctcgttatattgcgcaagccatacaataccttttgaacgaacaatgttttgaggcatttgttctaaccaatcattgaaacgtttcgcgtgaaacggtaatcgtcttgaatagacaaacgaactcataccatattcttcagtttccggtgtatgtgcctcatggccgccttctgttagctccttaatccatcctgcagaattgctagctttttcaaaatcaaatcgtcctgtatctaagacatcattaatatctacttgagactgcgttgttttaattatttttgcatctggttgtaatgttctaagtatatgttctaatttatctagcgcttcatttgtaactaaatctgttttattcaatacaagtacatcacagaattcaacttggtctattaataaatccgcaattgaacgttcatctgtcacatccgcaccttgattacgatccacaagtaaatcttcagaatgaatatcattaacaaatcgattcgcatcaacgaccgtaaccatcgtatctaaacgacaaatcgaagtgagatctattcccatcgcttcatcgatatacgagaacgtttgcgctacaggtactggctcagaaatgcccgtagattcaataacgatataatcaatattgcctttatgtaccagtcgttcaacttcttttaataaatcgtcacgtaacgtgcaacaaatacatccattagatagttcaactaatttttcatctgttctagacagtccacccccatcagcaactaaatctttatcaatattaacctcactcatatcattcacaataactgcaatacgacggccttctcgatgatttaaaatatgatttagtaacgttgtcttccctgaacctaaataaccacttaatacagttacaggtatcttactcatttatattctctccttttaaatcgtaattattacgatttaaattgtacaatgatttttaagattgtcaatatgaattaaatgaatgatgtgtgatatgacttttctatggcgagtgatttaccgcgtatgtcctcacctatacttcaagatttgatattccttaaatgcattaaatttttaatgacatcaatgatattgtttatgaaacattgctgatagtttttataaaaaaagagcgaaaaattatttttcgctcttacaaattataaataaattttttattttttagtattttattaaaattttgcgttaataaatttaactgagattgcacccagaagcatcatgattcctgcaaataataacatcgcaggcattgaacttcctaatagtgggaaaagtgcaaagcttactacagaagcaacaatttgtggtagacaaatacttgtgttaaataagcctagataagcacctgaattttctccatcaattgcttcggttaatagtgtaaatggttgagtattcatcgttaagttattaataccaatgaatataaatgaaataatgagtaaccattggttatgaataaagaacattgaaataagacctaatccaccaaaaattaatccaaaactataccaaaattttctttgagagggtttagattttgcaatgacaaaaccaaaaataactgaacttaaaaattgtatacagtataacacaccataccagttccctgctgcttgatatcctgctgaagaagggtctgtcgcattccatacattttttgctattgcacctgttgaatacgtccagagatacattaatgcaaaccagttaaaaaattgaactacactaatttgccaaaattgtttaggcgcagtttttaacagttgccataaatttaatttctcattcctattgtcatctgaaatgccgtgataatagttatatgttttaggttcatattctttaacggaaagaaccgtccaaatagaagcaatgagtaataccgctgctgcaatataataagctatttttactgtcatcggtacttcccctttaggcgctacattactcattcccataattgttagtaaaaatggtaatagtgtagcaataataccacctaaatttgagaagatttgttgccatgaccaggccatatctctttgtttttcgtttaccatatctccaataatcattttatagggctgcatacacgcatttgacgtcaaatccataagtaacgtcatgattgcaccaaatgacaacgccataagtgatgcatatccaaatccaaacgaacctgcattaggtagtaggactaatacgatcgctccaatgggaccagcaattaaaagatacggcatccgacgtccaaatctagtccaagttctatcagaatagtatccaataagtggttgtacaatcattcctgctaatggcggcaaaataaaaaaccaacctaaattattaggatcggcgccgagcgtttgaaatattcttcccatcattgctgattgaagtgcaaatgccatgtttactccgaagaaaccaaatgtaatagaaaaaataactgctttttttaaatagggtagcgtcataccttgttcttcagtatttttagtatgtatttgatctgtatctttcatttctatctctcctatttattacttgatatagtcatttaattcaataattaaatagctatatcaaataacaatttgttggaatcgttttcaactgtaattataacatttttgagtttctttgagaacgctcgcatttcctataaataaatcagagttcattttattttctaatctcatatatatcataattacctaatttaggtatttttatagataattaaagattattgtgatgataatagatatattaatacttaaaaacaaaatatataacataatctataattagattattacaataaataacgatagaaaaaattgattatattaaatataattagatcattatttgtattttaactactttttaaaatacattagattatcaaaaagattactaattaaaggagtataaaaatgaaggttataaagagtaaagaaatcaatcataggcctaaagtaagtgtattaattagtacgtataacaaagaaaaatttattaataaaacattagatagtgtcttaaaacaatcgatggatatgagagattttgaattaatcgtggtggatgactgttctactgaccaaaccgttgatattgtttctaaaaaaatagacagtttttctaattacaaatttattcaattagatcaaaattcgggtacacctgcgaaaccacgaaatttatctattgatttaagtaagggaaagtacatcatgtttatagacggtgatgattggttacctgaagatgctctagaaaagttatatacacttttaaaaacaaacaagacagactatgctacaggcttaacaaaatatgtgcatagtgatcgcatagctagaagtggcgttgctctatctaaaattgcatataataaagtagatttaaaacactttagaaaatcattttatcatttagcacctgctggtcgtatgattaaagctagcgtcattaaaaagaatcatattcaatttccagaaatgatttttggagaagatttacaatttttcgcagaagtctttttcaatactaaacgtattagtacaacacaagatgtggtttattgtgctaaccgttacgacgataatatttctttagtaaaatcagaaaaatcaacacatattaatcgtatgaaatggcaaggtgaagcctatcgtcacttaatgagtaaatataaaaataataaattaatgcctaatttactatatcgtattattaataaagatgttttagaagctaaattctataaaaaaggctttattaaaaacataaatgagttacttcctatttttcaaaatatcattcatatggtagatgaacatttcgatgctttagactatgcagatgatgatttaaaccgacaagccatcaaactaatacgtgaggggaataaagaagacattatcagttttgttaaattctatcttaaaaaagatgataagccgcttcatgagaaaaacgatatatattactattcgtttaaaggaacacattacaaaaaaagaatgcatcctacattactaaaaatctctcaagagaatgataaggtgttcttaaaaatactttctaaaaactctgagttaaagtatctagaagtaaaacatcgaaaagatccaactcaattcatcgtattagatattaagaaacatcgttttaaatctgaagaatatactgttcaatttacaacaaagaatttacctgatggaaaattagctcttacagttttagataaagatttaaatggctcagttatcaaatcaggcatgcgttttgatttttatgaaactgttggtggcaatttaggatatattaaaaagtaattaaaatcttagatgtttcgccaccgtagcattcattttacatatatttattcgatatatgtaaaataacgatcttaataaattataaatcttagtcttgttatctatgtatttttataattccaaaagaaattatgctaaatttcaaaataatgctgtacttattcattcaaaaggtgtatagttggtttcacgtaataaaagctcgtattttggattgtagtatatttttatagaatattctcttttaatttatgaatttgttacaaatatgatgtgcaaaagcacttggaggtattctatatgaataacggtacagttaaatggtttaacgcagaaaaagggtttggatttatcgaaagagaagacggtgacgatgtgtttgttcacttctcaggtatcgctactgatggatataaaactttagaagaaggtcaaaaagtagagtttgacatcactgaaggtcaacgtggcgaacaagcaacaaatgttgtccctgtttaaacataaattttagcacaagcatgtatgtatacgtgcttgtgctttttttatcatttctttttgatattgatataaaaaatcatctttatttgtataatgttgataaaaagtccctctactaataccactttctcgacaaatatctttgacgtttatatctttataaggtttatcttctaatagtcgaatcataccgttttcaattttagttaatgttttatatacacgtttatctacaatgttttcattcatttactgatttctcctaaacaatattgaacacttatcattgttgtgtctgattatttttaattaatacactctaacttagaaaattaacttatattgactatacagtaattaaacacagtgtcaaattcaaataaggaggaaacatcatatggcacaaacgattgcaaaattaactgatgcagtaaagcagtacgataaacataacgtattagatcatattagcttaaatattcaagaaggagaattactcggtctcataggaccaagtgggtctggtaaaaccacgacaatcaagtgtttacttggtatggaaaaattgaattcgggttctacagaaatatttggacagcgtatgcctaaccgtcaagtgttaagccgtattggttatatgggacagaatactgcactctatgagtcattatctgctaaagagaatcttatcttttttggccatctagcgggaataaaaggtaaacagttaataaaaagcattaaccacaatatggagctagttaatttagagaatgcactaaataagacggttaatacattttcaggcggtatgcaacgtcgattatcattagccattacactcttatctaacccaagtctcattatattagatgaacctacagtaggtattgaccctaaattaagacaacaaatatggaatcagttaaagtctctaactaaacaaggtaaaacggttatcgttacaacacatgtcatggatgaagctgaacgttgtgataaaatcggcctcattgtagagggtcgactcttcgccataggtacaccaaatgaattaaaacaaaaattcaatgttgaaacaatagaagaggtctttattaaagctgaggaggttaaaaatcaatgaaacttttagcaatgattcaacgcgtcatcattgaattattaaaagataaacgtacactcgcacttatgtttttagcgcctttattagtccttacattaatgtattttattttcaattcagatgaagatacaacattaactattggtgttgaccactcagtatccactcaaattacagagggtattaaaagtgacgatgttaaatttaaggattttccatctaatcaacatattaaatctaaaattgaacatcatcatttagatgcttttatttatcaaaataatcaaaccatacatgttacgtacactaatgaagatccaagtaaatccgcttcgattaaacaactccttcatcagtccattcaaaaagataaaatgaatgatataaaaaaagtaatggtgtctttaccacagtctgctaaaaataaagacgctaaagatatccaattagagaatacctatttatatggtgatgaacatagtaattatttcgataaaatgttccctattcttatgagtttctttgtctttttatttgtttttcttatctcaggcatagcacttttaagagagcgtacaactggaacattagaacgtgtacttgcgacaccaattaaaagaagtgacattgtttttggttacttaattggatatggggtttttgctattattcaaactttaattattgtatttttctcaatatacttattaaatatcaatttagcaggcagtcttacttacgttatacttattaatattttattagctattgcagcattagtaatgggaattttcatttcaacatttgcaaattcagaatttcaaatggtgcaattcatacctattgttgctattccacaggtattcttttctggaattttcccactagaaaatatgtcaccgtggttaagtaacataggatacttattcccactaagatacgctggtcacgccttaacaaacattatgattaagggtcaaggatggtctaatatatggtttgatgtattaatactatttgttttcattatcatatttactacgatgaatatgattggtttaaaacgatatcgaaaagtctaatataactttcgtgttaattataatcctgatactaacgtacttaaatgaaactaagtatcaggatttatttttattacatttatattcttctttcaataaactatacacgtaatgatctgaaaattatccttatcactattgatttaatagaacatacatttttacttgatgcatatttgtattccaaaataaatgaacacgaggtaaaaaaagtttaaaaaaattgtctgtgtgaaaatacatactatataaagaaaataaggagtgttaagtatggctaataaaattgcaattgctggtgcgggtgcaatgggaagtcgtattggtacttacctaaaacaaagtggacaagatgttacattaatagattactggaaagatcatgttcatcgaataaatgaaaaaggagtagaagttcaaactgaacatgatacttatactgttgaaatgcatgccacattccctgaagaggtcaatcaaatctatgatattattgtacttttaacaaaatcaatgcaatctgaacaaatgatgcaaattttaaaagagcagggagcaattagcgaggatactgccatcttatgtatgatgaatggtttaggccatgacgaacgtctatcacaatttgttccaaaatcacaaattttcttagccgtaacaatgtggacagctggattacgtggtccaggtcaattgctattagaaggtgaaggttcaattgactttcaacgtgctgatggtaaaaaagacccacgtactcaagaaattgcagatatcttaaatcaagcccatttaaatgccactatcagtaatgatgtatttaaagcgatatggtctaaagctacgcttaacagtgttttaaatccattgtgcacgatattagataaaacaattggtgaattgggcgcttatgatcattctagagcaatgatacacccaatcattgaagaaattgtcgacgtagcacatgctaaaaatgtagatattcatattaacgacttaatctcgaaaattgaagcagcttatcctgatcatgcacaaggtttacactatccttcaatgcatcaagattataatcatggtcgtttaactgaaatagattacttaaatggtcaaattgtggactatggtaaatcattaggtatcgaaactcctaataatgaactgattactcatctcattcatcaattagaaatgaagttaaatataaatgaatattaagtaatatgaaacgaactaggtcactttgataaatgattgaaaaattgtttactcttttgatacatttttatgattgtataaccccctaaacttattatagcttagggggttgttgcttaatcatataagtgaattgaaagctaatcaatctgatatgaagtaacatattttaagtaatatgatatatttttcttctaattcttgtctcatttgttctaaacttgctgaaaaaccgcatcacttatgataagcgtctgcgtatcggttaatgatgcggtttttaattatataattttaattaataaggtaatgaacagttttttgataaatgttattcttctaaaattctttttaatttacacactaaaaaatatcctccttaacaataataagttatttaaattattgattaaggaggatatctttatatctatttatttctcaatctagaactagatttttatcgtgctttcagctcatttcctgtcatccatttatgatttttaatgattttaccattatctttggatttgtaatcaaccacgtaaacagtcgtctttttcacgttatctatattggctgtagcacctttcatgccagacatatgatttgcttctaatttaacagtatcgcccttactaaatccatctttaggtgcatctttaatctcttcgtttacgacccatttatgattgtttactttttcatttccatttgtgggtttataacttacaacataagcatatgttttatacgcaccttttacagtagcttctgcgcctttcatccctggcatatgccctgctgtaatggttactttatctcccactttaaattcaccctcattagtcgatgtcatatcttctggaactttactttcatcattatgcttcatatggctctcacttttttggtcattagtgtctttatcttttttcatcatattaaaatctccctattgattagtttgttacttttatttgacccatcattccattatcttcatgctcaagtatatgacagtgaaacatgtatgttccagtatttttaaatacaacctctattttagctttttgtccaggttccaaagatataacatcttttttacccctcatatcttttggaggtttctccccatccacagataaaactttaaattgcgttccatggatgtggaaaggatgtttcataccacccattttatctttgacgttttcaatttcccatacttctttctggtttaacttttgtgtaaaatctattctgttaggatcgaatttattaccattaatggtaacattatcattcataccttctaattttatttttttacttacttttggtgtattacctttgttagaacttttctctttgttactaatcggtaaaattacagttttatcattatcaaccagactgattttctcgcctttcattttagataaatctattactatttcttttctttctgaaggagctaaattaatttcttttaattttttagcgttttttaattgaccgccatctgaagcaatatactcaaaactttgattattacttagcttaagatttaaatctcgagcattagaaccatttaaaagtctcaaacgtattttctcttcttttgttgtcagtttggggtttactattccgttcacaagaacagtatcaccttgagtgccatcttcgtctttcgtttttgaataatttaattttttagatacaaatgttttatcttggattattataggcaaatcattttttccataattactaggataattattctttttactatcttctatatataataatcctgataagccattataaacttgtttagctgtatttggagaggggtgggggtgataccataacgtagcagaatcttgattaacctcaaattttatagttttttcttttcctggttttataacctgagaaggccctccatccacttttccatttacttctaatccatgccaatgaaatgttgtattttcatctaagttatttattaacttaattttaactttatctcctttttttaattttaaagttggtccaagtaaatttccattgtagcctagagtattagaaaaattatttttgtaaaactctgtctttccttcctgagcttttaatgtataatttttataaccattgttatctttttttgactctgcaactttaggaaatattatttcattttttccttgtgaagaatttaatttctttctttcgtcatgatgtttcatatttgtcatatccattgtatttttcttatcttctttcatattcatcatatcattcttactttctgcgaaagtatcattagacgcaataattattatggaaaaaattataattaaaattgcaaaaactttattatacataaggtttacctcttttattttaattttaatgtaaaagcattaatcgctactataactgtacttaaagacattaatattgctcctacagctggtgataatattaacccgataaaagctaatgcgccagctgctaaaggtacagcaacaatattataacctgcaccccaccataagttttgcaccatttttctcatagtattatttgaaagagtcaagaaatgaataatatctgatggattacttttaacaagtatgatatcacctgaatccactgcaacatctgtgcctgcaccaattgctataccaatatcggctcttataagactcggcgcatcgttgataccgtctccgaccatcatgactttattaccgtcactttgataattttttataatgctttccttatcttctggcatgagttgtgcgtggacatcactaatacctaactcttttgcgacagcgtgtgccacttcattattgtcacctgtaagcatgactggtgtaatatgtcttgatagtaaatcagctaccatttgttttgagctttctttaatttgatctccttgagcaatcatgccaatgacttgttgatcctcaattaaatagctgattgaattaccttgttgagctaatttagtaaacaagtcatcgtcataattaagtttatgtttatcaagataagagacatttgttattttatatgttttattatcaattagaccttctaatccgacacctggaatattattaacgtcttgtgggttagtaaatgaaacatttttacttttcgcaaaatcaacaatacttatagctaatgggtgattagattgactttctaatgaggcgaaaaggcttaatactgtatcattactcaaatcatttttaaagctctcataatgattcacagaaaagttaccctcagttaaagtaccagttttatccatcattacataatcgatatgttgagctatttctacagactctctatttttaataattaaaccattatgtgcaccaattgaagtagaacgtgcagtgactaaaggtattgccaagcctaaagcatgtggacaagcaatgactaacacagttacaagacgttctaatgcaaaatcaacatcattttgaatgagcatccaaacaataaaagaaatcacgccaacacttacagcaaagtagaataaataacccgctactttatcagataacaattcagcactagatttatcattttgtgcttgattaacaagtcccatcacttgagaaagatatccatcttctcccacagctgtaaccttgacttgtattgttccagacccattaatagaacccccgatgacgttgtcattttgatttttttgtacttttttagattctccagtgactagggattcatctatagatgtttgtccttgaacgataataccatctgttggaatgctttctccggcttttacttcgacgatatcatcagtcatgatgtctgatattttaacttcttcgcgttggccattatccataactttaatcgcactattaggtaacagttctgccattttctttaaagcatctccagcatttccgacagcattcatttctatccaatgtcctaatagcataattaaaattaaggttgctaattcccaaaaaaagtccattgtatgaccagttgcactactgaagttattcatataaaaagcatacaagctataaatataagctactgaaatacctagggcaactaaggtcatcatgcctggtttttttgcagcaatttcatctttaccaccagacaagaacggtttaccaccataaaagaataaaattgtacttaatattaatactacccattcagaacctggaaatgtgaattgaaagggtaagttaacgcccatcattggcgataaaagaatgataggtattgcaaaaattaatgaaacaaaaaacttaactttaaaatttccatgatgatgtgcatggccactatgatgatgtgaggcatggttatcatgatgcatgtgattggaatgattcatgtgattttgatgattatgctcttcaccattattcttcaaattaacccctcctaataaaaatgttatagtaaaactacttatactataacatatacccccctagggtataaatagtttcgatttatctccatttatggatttgtttatatcattctgaaaatgatgtctacacgtcctacattagagcttgtcatcgatgtttaaaacaaggttttaattaaaaaatctcatctgaactatcgcatgacaatacactctaaccaaggttagcattatcaacacaaatcatatattactatgcttaaagaaaataacgcatttcaaagtaggtctagaaaagcaaattgtctagatcattatttaaagaagccagtaaatgaattcataataaactcatttactggctatttttctagtatttatattcagtcttttcaaactatattaatcattttttgattctcaaattttacgccacaatagctgcattttactaaagatactatatattcaaacaatttcagagtgagttatatacaacctcatttttagttttatttataatatgattctgcgtatcggttaatgatgtggtttttaattaacgtctttttgttataagtcctaaagaatattaaataaacaacagcattttccttaattgaaacgaaagaacgacaaattccatactattacattggaatttgtcgttcatttattagaagcatatattttacagacttctaaattaattgttacaacaacaattattatcctgttgctctttttcatttttctcttttttttcttcaatttctacagaacaacaagattgttcctgaggttttaatttttttaatacgtctttgactcccattatctcacctcctttaaataaggatgttcaccatcaaacctgtagaaatagctacaactaaaatggcgataacgaatgagattacaaattttttcttgaatagtttcgataataatacaacttctggaatacttgcaccagcaccaccaatgatcaaagcaacaactgtcccaagcgacattccttttgaagctaatgcttcagctataggtaacattgtttcaggtctaatatacataggaatacctataatagaagcaataaatacggatataatgccacctccactcgcatatttagtaataaatgtttcgggtacaaagccatatataaaagcaccaataaatacaccgataaataagtaaggaatcattggatataagaatgcccaagcatcatttaatgcttgtttaaaacgagatccatttttattagcgaaaaacccatcgcctttaacatttacacctttataacttttagataaattcatttttgaaaatactagacccgttaagacactaaagattgctagtacaataaaataaacaacagcaactttccaacctaataaggcccataacataaatatcattaatggattcattaaaggtgacgcaattaaaaaactcattgcaggaccaaatggaactttagaatttaataaacctgcaagtataggaattgtagaacaagaacaaaatggtgtcatcgcaccaaaagccattcccaaaatataattaatagcttgattaggtttacttaaaaagtattttattttttcttctgaaactatctgctggatgatacttacgataaagctcacgatgataaatagtatgaatagttcaaaaaacaacatcacaaatgtttttataaattccataattgaatctaacatgagataatgcctccaaatttaattaatcaatatttcttgatgtattaatcaaaaaaaattgattaatactatattaaaaaagatacttaaagtatcttacaacaagtatcttcatttaaaacaacctgtatttgctgctcattaattttataataattccatgtgccatgcttttcagcaataagaacatttgcatctactaatttttttaaatgataagaaagtttagattgttttatatctaataactcttctaaatcacatacacataatgatttattgaagctttggctaatttgatttagtatttttaatctgattttatcggcaagtgcattaaacatattttcataaaagtcaaattgttgatcttcactcatatcagtctttgctttaataacttccataaaagatcatcctttttataatatttcattgagtttatattatctttatttcaattcttgaattgcttgtttatagttattttttgttgattcgccatactgattaatgttccctttaaagaactccttttccatatatattgtagcttcttttaaattgatttctcttgatagcataacaagatttaaataacttacaaaataaccaacagttaaagtacttgcatggtttactcgcaatcaagcacgcctccttattgtcaacgtagttttatatcatttaatacatcaattttttttgatatattaaatataaatcaatatctatattatcgcaagaagaaaacctataattttacataaacttaggtattgctcacagaaatattaaaataatttttttataaattgtattattaagaattaaatttagtaaaatttttaaaactcaaataaaaacatagacacccatctatatagatgttaatctataatcgaaaattaattaatgaggtgagtataatgttaaatattgaaatatacgaagaagctatgtgctgttctactggggtatgtggtccagaaccggatgaaacactaataaaagcgaaccaaatcaatgaatatttaaaacaaaatcaaatagaagttcaacgttataatatgaataataatccgaatgaattcattaaaaatcaagaagttattcgtttaattcaagaaaaaggtgatgaagttttacccatcacttttatagaaggcggtatagctaaaacgggcgcttatattacccaagaagaagccgatgaaattattacagttaatcaaatgagaaatggaggatgctgtggtggagatggatgctgttaaatacttaaataaattgaatttagataacattgagttaacaaaatatttgttttttactggtaaaggtggcgtaggcaaaacaacgatatcaagttttattgctttaaacttagcagagaatggaaagaaagtagctttagtaagtactgatccagctagtaatttacaagatgtatttcaaatggaattatctaataaattaactaaatatcaacctatacctaatctctctatagccaattttgacccgattgctgctgcagacgattataaagcacaatctatagaaccttatgagggtattctaccagaagatgtgctttctgaaatgaaagaacagttaagtggttcatgtacagttgaagtagcagcatttaatgaatttacaaattttttatccgataaaactttagaacaagaatttgatttcattatatttgatacagctcctacaggtcacaccttgagaatgcttgaattaccttctgcatggacagattatttaaatacaacgaataatgacgcttcttgcttaggtcaattatcaggtttaaatgaaaatagagttaaatataattcagcacttgaaaaactacgtaaccaagatgatacgaccatgatgttagttgcgagacctactcactcttctatatatgaaattcaaagagcgcaacaagaattacaacaactgtcaatttctaaattcaaagtaatcattaacaactatatagaagaaagtcacggtttaatttcgagtcagatgaaatcggaacaagataaaaacattaatcattttactgaatggttaaataacaatcatgcttattacgttccatataaaaagcagaaagaagaaggtatagaaagtttaaccaatctattaaatgatgataacttaattgaaaatgatgactttattgttgaagatcatccgcaattcaataaattaatcgatgaaattgaaaatagtaaagttcaatatttatttacaatgggaaaaggtggcgttggtaaaacgacagtagcaacgcaattagctacagcattatctaataaaggatatcgtgttcttttagcaactactgaccctactaaagaaattaatgttgaaactacaagtaatttaaatactgcttatattgatgaagaacaagcattagaaaagtataaaaaagaagtactagccacagtgaatgatgatacaccacaagacgatattgattatattatggaagatttaaaatcaccttgtacagaagaaatagcatttttcaaagcctttagtgacattatggagaatcaagacgacatggattacgtcattgtagatacagctcctacaggccataccttgctgttacttgattctagtgaaaatcatcatagagaattaaagaaaaaatcaactcaaactaccagtaatgttgaaacattattacctaaaattcaaaataaaaatttaacacagatgataatcgtaacactagcagaaaaaacaccttatttagaatctaaacgtttagtagaagatttaaatagagctaatataggccataattggtgggttgttaatcaatcgttagttacgctaaatcaacgtgatgacctttttagtaacaaaaaagaagatgaatcattttggataaacaaaattaaaaatgaaagttttgataattactttgtcataccttatggggggttatcataatgaaaaaaattgtaatcatcggttcagttgctgccggtacaagtgtcgcggctaaagcaagaagaaatagtgaagatgtggaaattatcgtttttgataaagataatgatatttcgtattcagtatgtggtatcccctactatataggcggtaatgtatctgatattgatgaactcacgccaagaaatgctaaatggtttaaagagcgctttaatatagatatttatacaaaatatgaagtgaatcagataaatgatactgatcaaacaataactgttaccaatttagtaaatgatgaaaagatgattcaagaatatgacgaattagtattagcaacaggctcatcgcctaaggaacttcctcaattaaatagcgaagaatataacaatgtatttaaagttaagaatattaatgatgcgaaagcaatttataattatattgagagcaatgatgttcagaatataacaatcattggtggtggatttattggtctagaaatgttagaacaattatctaactacaatacttcaattattcaacgcagtacttttatgcctcatttagactacgatatcagttttatgattcaagaatatattgaagataaagctaacgtatatacctataatgaaatagatagtattgattatgatgaaaatcatacaataaatagagtaagcttaaaaactggcgaattaattgatacagatttaatcattattgggattggtgtcacaccaaatactaaattagctaaagaaattggtattaatattggaaaatctggagcaatacaaaccaataagtattttgaaacaaatattcctcacatatatgcaattggtgatgtagcagaaagttataatttaattactggtgaccctatatatagaccgctaggttctacagcaaataaaatgggacgtattttaggagatcgattaactggtggaaatctagaacataaaggcattttaggaacaggcattgttcgtatatttgatatgacaattgcccaaacaggcttaactgaaaaagaagctattgatttagatattgatattgacgtattacacaatgtgaaaccgaatcgtccagaatatatgcaaggccaagaaatggtaattaaagctatatttgataaaaacaattctaaattactgggtgctcaaattattgggtatgaaggtgtagataagagaatagatgtactagctactgctataacgtttggcgcccatgcagaagatttatttcatttagatttagcatatgcgcctcctttttctacaactaaagatcctgttatttatacagggatgattggacacaatattactcgaggacgcaaaattataacgcctgaagaagtcataaaacaaaataatgacttattgattttagatgtacgttctccaaagcaatttgaagttaatcatgttgatggagcgattaacgtcccattgaaaatattgagaagttatgcaaaaacattagataaaaatcaaaagatagtgacttattgtaataaaggtactactgggaatgctgcacaaaacgtacttattaatttaggttttaaacaagtgtttaatttgtcaggtggtaataaaaattatcaacgttataaaaggtttcaagtagaaaggaagaagaaaaattgaattataaaaaaatttcacaatacttaaaagtgattgctgatagtagccgccttgaaatattagacttgttatcttgtggtgaattatgcgcttgtgatttattagagcatttttctttttctcaacccacattaagtcatcatatgaaagtattaaaagacaataatttaattacatccagaaaagatggtaataaaattttatacaaattgaatcatgacgtattggatgacgttacatcacgactgactctattgagttccagtgctggcccatgtatatgtgaaacagtagagaaaggtgagtgttaatgatgacgatattagcaatcacaatatttgtattaacgttaatttttgttatatggcaacctaaaggtctagatattggtattactgcattaattggtgctgtagttgctataatcactggcgttgtaagcttttcagacgtactagaagttactggaattgtttggaatgcgactttaacttttgttgcagttattcttatttcactcatattagatgaaattggattctttgaatggtctgccatacatatggtaagagcatcaaagggtaatggcttgaaaatgtttatctttatcatgctcttaggttcagttgtagcagccttcttcgcaaatgatggtgcggctttaatactgacgcctattgttttagcaatggtacgtagtttaggatttgataaaaaagcgatattcccatttattattgctagtggttttattgcagatactacgtctcttccattaattgttagtaatttagttaatattgtttctgctgattactttgatattggatttgttgagtatttcagtaaaatgattatacctaatatattctctttaatcgcaagtattcttgtcttatggctttattttagaaagtctatcccaagaaaatttgatgcagtaaatattagagaaccaaaagaagcgattaaggacaaaaagctttttaatatctcatggattgtactcactgtattgctagttggttatttaataagtgagtttataaatattccagtatcaattattgctggtatcattgctttaatatttgtattattagcacgtaagtctaaggctgtgcatacgaaacaagtaattaaaggtgcgccatggaatattgttttattctctattggtatgtatcttgtggtatttggtctaaaaaatgtgggcatcacaacgcttcttagtgatgtactaacaaatatttcaaattacggcttatttagtagtatcatgggcatgggctttatagctgcattcctttcatccattatgaacaacatgccaactgttttaatagatgcaatagcgattggtcaatctcaaacaacaagcatactcaaggaaggcatgatttatgcgaatgttatcggatctgatttaggacctaaaataacaccaattggttcgttagcaacacttctctggttacatgtgcttactcaaaaaggtgttaaaatttcttggggacaatactttaaaatcggtattattataacgattccggtattatttatcacactgttagggttatatctaacacttattattttctaaaaaaagaggaaactatttatggataaaaaaacaatttactttatatgtacaggtaattcatgccgtagccaaatggctgaaggttggggtaaaaaaatcttaggtgacgaatggcaagtatattctggcggtattgaggcacacggtgtcaatccgaaagcaatcgaagcgatgaaagaagtcggaattgatatctcaaaccatacttctaatttaattgacaacactatactaaaccaatccgatttagtagtaactctatgtagtgatgctgatcaaaactgtcctgtattgccgcctaatgtaaaaaaagaacattggggatttgatgatccagcaggcaaaccttggtcagaattccaacgtgttagagatgaaatcaaagcagccattgactcatttaaggctagataaattttaagcgtctcaatatcattgagacgctttttttaatatgccattttagacgattacagagttttaaaatgatgaatacattttaactttattaaaattcccttctattaagaacgttgaacgactcaatgtgagttattgcaatacactatttttaattttcactttctcaccggttttaattttatcgtattgctttttcgggacaacaactaaacgtttgcctttattagtttgaacggtaatggtatataatttctcatgcgctttcatttgttgtttcaacatatttttttggtattcaacacgattggttttatttttatacataccggatgtaataaaataaaaatataaccaattattataatatgaagtggccataaattgtgacgtatatgaagctcctggtctatatcgatgtcttgtagacaccattgatcgtgcttgttgagactgaattttaccagtgtcttgtttgaattttgatgtcttgttattatatgtcatactatttgttcgactagcttgttgagctgcacgctgacttgattgttttgcaactcgtgaagcattcatcgtacttgaacgactcattgacgaacttgaagacgttgagcttctaactgcagaagatgacgaactactactcgaacttgagctactcgtgcttgatgttacagcttctaaatttgtagacaatatacaaagcgagagcacattaaagattatcattatacttatcatttttaatactttatgcttcacccactcacctcttactctttagatacttcatctttagcagtaacttgtccttcaatatcgtcatcgccataaatcatatatggtggacgatagacatgaatctttttgccatctttaattatataaggctttttatttccatcatttaaaatatgttcataaacgtgttctaaatccgtcttttgtaaatgtgatttaccatttttatctttatattttatttccacattgggtgtatcttctgaaccattatttagcacttcataatactcatatgtatatttctctgacttttgactatctttagaaggttctttctgttctcccgatgttccacaagctgctaagataaaagacaaactcagtagactagctaataatattatctttttcataaacactctcctctactcatttgcattgtaacattcttattccattcatttccaagtgagggatatataacttattttatctttaacacttttatatacattttaatatatcaattgtaagttatttcatttttaattatttttgttaaactatatttaaaatcatcgattacttttacttataagtttagatttttaatacaaaatatgatgagtaaggagagatagctatgtcaatatggtttgttttattaccttcactatcttttttagccgttatgataatagggtatatttgtactaaaatctttattcgctaatatacgggtcgccttatactatcgctatacttcacttattgtgtttgcttattgatcacacattgtaagtaaatggctagtaatatttctttctctactctagtgctgtgaatgtgtatagtgtgtttttcgcctctttttttagttcgcttgctttttgaaatatctaaaaaactacgctttgcggttaatactacgtcattctcaaatgtaattttggtttcattactaaaaaatggattgcttacatcaaacacctcagatttgtaattaaacgtgtaaggaatttgttgctttcccccacttttaaagaactgtttcatctcaagtgtacctacttcttcattattcaaatacatcgtatattgatgtctattcgctaccccatgtttacgaattatttttacatcgttctcactagaagtcatatatatactatattttgtttgaataccaaagagactcaataatttatgaaatatattaacaaaaacgggtttatacgttattgtttcgttaccatatatcacattgctttgattctcaatgatatataaaggcatttgtacaaagaattctcccgctttaaaatctttattattgagatttttattaatgagtggatgctttttttgtaaatgttttctaaaaagtaaaacgcctactataattatagtaactattccccaaactaaccatgtactccaaagtggaaccttgaataatgatgattttcccacaagcactaaaaacgtgtttattaagttaaatatgagaagcactatccatatcagtgcttcacgaaacatcgtcattacccatttctcctttatttaataagtaagtttataatataccatgcaatctatttttttattgcttttgtgaggtacttttgcgtatcggttaatgaggcggttttttatacttatatgaattttaatggttcttatacttttttatatgaacttattgtatcactaactaatcatcttattgaaagacagaaacgtaattattagttattgcggaatccggaatgtaaagtttctgaatacgtgaaaaaagacaaattctattgagttgtataaaatttatctctacctgttaattatatttttggttagattatttatttttcatgtgttcttctttcattctcacaaatatcacgtcatgacctgtttttagaataactatttctatcatttttaccaatttcaatatatttttctaaatctgtaaaattcatatttctatttcttgaatccaatgttcacttaaaaataaagtttaaaacttgttctaaaaattccattctagacaatttctatgtatgttttgaataatagtagaagtctgaagaaaaacaattgagcattatatcaaccttaaaagtcaagactttcaatattctttttttaaattgcaatttaatcaaatcagctagtgaatgataaaatggaatatggattaaggatccagcagggtttgaggacttttcaataaacgatagaattgtaaagtttgtctcttttaaattcaaaaaatagcttaaaatgccaaaaacacgttaataaggagaattacttctatgtttttctaaatacgtatcaatttcttgaaatatagcttcaacctacttgtccataactgattcgcatagacgtgccttgctctcaaaatgtcgatataatgtcctcccacctacaccagcatatttagcaatatctgacatcttcatttttgtaatatctatattgctatgtgataactcaattgttgatgacataattatatttttatttcgtctgcatcacttctaattttttttggtccccgtgtcaaacttaatatccctttccttatttaatgttttatttccaacgatacttaacaatgatttacaggcaattattaaccaatctctattaaaatgaatatcatactacttacaataaaactagagcatccttcacttttacggtgagggaagccttattatttatttttttattattactattaatatatttattcttaatacaatcaaatatgagaattttataggtttcatagtaagagtaatcaatcgagaataacaagaaaatgagaattagtatgtgatgaattaattgttaaaataaagtgttcacagtgaatgatgacttattcgttatttatatttataatgcaaatatatgagaaaattttgggagtggaattatgaaactaagagcattagagtatagtgatttactttttgttcatgaattaaataatgaatattctattatggcttattggtttgaagaaccttatgaatccttaacggaacttcagtatttatttgataagcatttattagatgaatcggaaagacgttttatcgttgaagatgaaaatcaagtcgtagggattgttgaattagtagaaattaattacatccatcgtaattgtgaaatacaaataattattaaacctgagttcagtggtaaaggttatgcaaaattcgcattcgaaaaagcgataaattatgcattcgatatattaaacatgcacaaaatttatctatatgttgatacagataacaaaaaagctgtgcatatatacgagtcacaaggatttaaaactgaaggattactcaaagagcaattctacactaaaggtaaatataaagatgcctattttatgtcattattgaaatctgaatatattttgtagcataaaaaataactcatatatttatttaggtaggttcaaaactaaattactagaacgggtttcattcgaatatccattagaggaataaataaaattaaaagagaatttggatttgtatgaatggcactcaatataagaaaagtagcagctcaattgatctgaaaataatcaaaaaattataaaaaagacaatttctatattatttcaatagaaattgtctttattgacttatccagagactttatgtctcagactcatcatcccactctcacatgaattgcattgagttgacattttgtataagcacacaatcattatatataaatatttaaacgcttttttatccgttaattaccatgacgaagtatccctttttatctatacactaatccaccatcagttaaaatggattgaccagtaatatagtcagaatcattagaagctaagaatgatactaagtttgcaacatcgaatgattcttgatatcttccaagcgtaatttctgaagaaaaggcttcaaacgcatctcctatttcaggactatcatcaagtttaaccatttattcatcaatacgatcctatattttagttttagcaacacttgagcaataagcatttacagtgatgcctttattcactaattctttggcagctgttttacctatatctatctgccgtcttaattatctatcacccttaaaacaaggtgatagtaatcaagcaataatatttactgcgccaactcccgatttaagcatctacattctttctaggaattaaacaatacgcggcaataaatgcgataaacactaaacctgcccccacgataaatgcgattgtagctgcaaattgtgctggatgattgacagacaatgttgtataaattgtagttataacagcgataccgaatgctgcaccgagtgtagaagtcattttgataattcctgatgcagtaccagctttttctgccggaacattagatacagctgtagatagcgctggtgtcgcaaagaaacctaatcctagacctataaagataaatccgatgcacgccacaatatagtaaatcatgttaggcaacgaagtgaaggctaaaagtataatacccactgtaattgataaaggacctaacataagtggcaattgtggccctcgattttgcataaaacgttcacctacacgtatcattaacaaactacacaacatatatggaattgtaattaaacccgcttgtgcgcctgttaaatgtttatcatcttgaacatagatattaaataatgcaagtgagcctatatccatattcaccattaaattagctaatgttgtgccaatataaatattatttgaaaataaactaaaatctatgaaaggttcattttgacgtttttcaaatatatagaaagctattaatgtcacaatgaatatggcaattaatattacaataataggatttaaccatccaattctatcaccttgcgttattactatgttaatacttaacatcataatgacaaaaataatgataccgataatatcaaattttttattatgtgcagattcatctttagattctggtatgcctttaagcaatattaaggcaagaattgagaaaatgattgacaacacgaaaatccaacgccacccaataaaagtggctatcattccagcaaatagtgatgctaatcctgttccaccatatgaaccaaatgaccaataacttagtgccttttgtctttcttcaccatgaaagaatgaattaattaacgcaatagttgccggaagtaggcatgctgcagataagccttgtaacacacgacctaccaataataaaagtggcgcatgagatataatcaatgcaatagacccaagtatactaagtatcaaacctgcgtaagtaattttaactcgacctatcttatcagataaacctcctgctacaactataaacacaccagttaagagtgatgtaagactgaccgcaatgttaacaatactcatatctacatcatagaaacgttgcacatgtggtgcgatattcaagaaagactgtgcaaataaccaatatgtgagaatccctaaaataatcgctacaatgagttgttttcctttattaaactgttcactcatcattaaacgccctcctgttctcctttatttcattacagcactttgaccggcaatgcgaccaaaagtgaaaatatctgctagtgcattaccacctaaacggttacctgcatgtataccaccagcaacttcaccagctgcatacaatcctttaatgatatgaccttctacatcaacgacttgtgcatgtgtgttgatttttaaaccacccatagtatgatgtattgcaggttttcgtggtgtcgcatagaatggtgctttttcgatttttaaatcaaatgcatttttattaaaatcttcatcatgtccttgttctacgaaagtattatatctttcaatcgtattcacaaaagtagttgtatctatgtttaatttttgagctaactcttctaaggtattagcctttattaaagtgccatcttctaattcttgattgattttgtcttcagtcgtattcatagctagcgctttaatatttgcgtctgcaataatatagaagataccgtctttttgttctaatgctgccttagataatacatctctactttcaaattcgttaacaaaacgatgtccttccttattaatgaagacgaagtttgaaggtgtcacgattaatcctgtgaataatgcacctgttttaggatcagaaatcggcatcatttgagagaatcccatacctacaatgtcagcgcctgcttgcacacctaaacgtataccatcacctgtaattgcaggagaatttgttgttttaatatcatctggaatgttatcccaatacgtattatattgttgtatcattttagtattcgctccaaaaccacctgtggccaacactacgccgtgacgagtgtgaatcttaactttagcaccatttgctttacgtgcttcaataccaacaacttgattaccttctttaattaatttttctgcagtagtttctgtaaaaatacgaccatgatgatgtttaacgtaatctcctagattttcaatgtactctaaaccttgtgctttcattggtttatgaccacgacgccatagtgcaccaacaggcatatctacaaatgaacgatcaaaatgtacccctttatctttcaaccagtatactgattccaaaacattatctgtgagtgttttaactaaatcataatcacctgaaatttcgacattattacgatctttacgtcttccacctagatacgtttgaatgcgatgtaattcaacagaatcgaaaagataatcatctttattgctacttttttcaaggtaatctttaatttgacgctttaaagtattgaaatcttcaagataagcctcatctatatccttttcatcatgatttaataactgtatcaatgtgtctttttcaccagcgagtgcagggaatgcactttgccatttaggctcagcagcattgacttgaccacctgttcggatggtattgccacctatagccgcaaatttctcaagcatgatgacttcttttccttcgtctaaaaccgtagctgctgcacttaaaccagcaccacctgtaccaatcacgactacgtcagtcgtctcttcaacgacctcatcagaccactgaacaactggtttaggacgtgctcgtaaaatatctggatcttcgcctgcttgttcaattgcatctgcaatgccctgcacgatgccttcacttgttactgtcgcacctgatatgacatcgacatttaacgtttgtccattgatgatatcttgaggtaaacgttcaaaaactgggttcgctataccttcagactctccactatcatctacttcaatacttacaattttatcttccgacaattgaactttcattggtagattgccattatgaccttttgcataaacatgatacgtgcctttgttaaatttcacttttttattttgtagtgcttttaatctttcatatttacgatgttcttcttctttatctaaaatcatgaagtccatcactttccacagaggagatggtatgtgaagtactttttggtcatgtatatcgacaaattgttcaacttcttcgttttgtgaaattttatccgtccattgaggttctattaaataggcttttccaacgcttaaaagatcataaccgagttcaagggcatgttctgcatcttttcgttgcgcaatactaccaacaccaattaatggaatttgtgccaactgtgcacttttcattttatgatatttattaattaaaggttctgtatcttcttgattcactatggacgtacgttggtaactgtttgctgatatatggaagtaatcgggttcatattttgctaaagtatttagtaaaaacattgtatcttcaaaacgtatgcctggctcttcaatttcttcaggtgagaatcgatatcctattataaaatgagaggcttcattttcagcaacgacatgttgaacttttgttagtacttcgattgggaatcgcgtacgtttttcacgactgcctccccatgtatcttctcttcgattagaatgcggagagaaaaattgttgtaataagtatgtgttggcaccatgaatttcaacaccatcaaatcctgcttctatagcacgacgtgtcgcttctccgaaatcttctatcatctgattgatttgagcatgtgtcatttctcttggtggtaccgcatcaggtcttaatgctgcaataggactcgcagatatgggttgttcaccttcattgaacttaggattcgccattcttccagcatgataaagttgtaaaatcgcttttgaccccttagattgaatcgcttctgctagacgtttaagtccaggtattttgtcatcgttatcaatacctatagcccctgggaagcctctcccatggttttcaacaaaacaactttcaacaataattgctgaagcatcaccagccctaaattgataataatcaatcatttctgatgtaacacttccatcaaaatatccagcttggatagtcatgggcgccattaatactctattttttaattcggcaccacatttaaatttaaaagtatcaaataattctttactcatagcaattcctcctaagacattgtgatttttttcacatttatacttaaaaataaaatactctttatgagtattctttaaaattttataaatacctctgcatttttgaagtcattaaaacgtttccatctcttgtcacaatgatgccttcaacaccatctatgaggtttaataattcaatattttgttgtgattgaccaaaactacaaattgtactccatacctcgccatcaatcccatgatcagatatgattgtcacgctaacgatatcattatctacaggatatcctgtattggaatccaaaatatgatgaaataattgatgttcctgtatgaaatagcgttcatagatgccggaagtaacaactgattgatgctctacatttaatgtaacgagtgataatgcatctttataaaaaggattgcgtacacctacatgccatttttctaaagtttccggttgtctaccaattgttaaaacattaccacctaaatcgataatggcagaagctacaccatgagataaaaagtattgctgtaattgatcagcaaaatagccttttacaatggctcctaaatcaatctccattcctggttgtgtaagaaatacttcatgtgtctttgaatttagaacaagattttcaggattcatacacattaaagcgcgttgtatatcttcttctttaggtttcaatgcatctttgaaaccaattttccataatttaactaatggccctatcaatatgttcatcttaaaattagaagatagtgtaatttcataaccataacgtatcatgttaaacatctcaggattaaccttgactggtgcgatacctgcatgttgattcacattcatcaaatctgattttggatcattagcactaaattgagattcccaatcatgaatttttaattcagcttcttgaagtaatgtgttcgaatgttgatgttcaatcgataaacgtatcaccgtccccattgctttaatcattagcgtttccacttttgattccccctctatacgtgtatcacaacgctaatatgtatataaaatttaaaagttattttaaatgaaattattactttagtttctacattcatattaacacaatttcaaatatttgatttttacttatttagatgttcataattatatcaaaagttaatcaaagtataaattttactattttaaaaaattctttattatatatttttaataaaaaagagtagaacagaagccatacagaattctttattccactcttcacacagtactatgatctgtaacaacaattattgatattccattagtatatatgctgtataccaaaataaaataagaaagcatttcctttagattcttatagttcttaaaaatatctaattcctttaaatcatttatattagaatacccactgtaaagaatactttcttttttagcaattctaaatatttcatcttcgctaatagatagaaatattgtttattccattcatcatataatttgaaatcatatgagcttagagtatgtatatgtaatagtgtcttatggtatttaccaaaatttattttatcctgttctttcatcatcttataggcttttttctacttctatgtctttcattcgacactctccaaagatatattttccataatctattttttagttttatttatgatatgcttctgcttatcgattaatgatgcggtttcctataaatacaaaaagtgaatttattacatattactttctcattataaacaaaaaggctacttattacactatagatatagtagaaattagtagccttaatcatagtactttctagtttatttttttccaatctaaaatattatcttctaacttaaatgctttatacccctttttatttaacaattcgactgcctctaaagaagttaaacataaattccctctacaatatgcagctatttgtatgtcttgcggcagttcatttagtttctcttgtaagtcctctaatggtatagaaacagcacctgggaaatgaccatgttcatattcttcagtcgatctcacatctaataatagtatttctccattatccactttggtttttaattcttcaattcctaaggtctggagcggttcttcgttataaaattgttcttttaaatatttgatactatcacgttgattttcagaaatctgataaaaggcggctaagaaatcaataatatcattactcgctaattgataatacacataatttttttcttttgtatatataactaaattagcattcaacaaagtttgtaaatgttttgaaacgttagctactgacatttgtgtaatgcgtgctaatttttctacactttttggcccacttataagtaaatctaaaagttctattcgcttaggacttgataagcatttacctatatttgaaaattcattaaatattgagtctttaaaatttctatcttttaacatcgattaccaccaccattcaatattaaaataacaagttcaagttatcaaaggcaaatatattgcgtcaaatcagattatgttctgatttttttattgaaacgtaagaagggaataattgttaaagacagtagcccaccaacaattgccaatgtcatataattgctttgtgccataactataccagataatactccgcctgctgcacctgataatgcaataaatacatctatttgtccttgaattttagcgcgtatatctaaacttgtagattgaactataattgtagtcccactaataagatcaaaattccatcccatacctagaagagataagccaatggcaatccataacactgaatttgttggagcaaaagcacaaactatccccgctaatagtaacgttaaagcagatgcaatactcataactttcgtaccaactttatcaactaatacacctgtaattaaagaaggaagatacataaaaccaatatgtaatccaataacaatacctatagcgtttaatgagtgaccattattctctatatgaacaggagtcattgtcataattgcaagcataacaatttgagttaataccataataaaaccgccaaacactataccgtttttatcattgattgtttcatcaacctcttgtttgttattgccgaatgactgaatatgatttgcgattatataaggatctggtctgagcataataaacaacactatccctgccataatataggctattgccgctaatataaaagggccacttaaagatggtagatttaaattttgagcaatacttcccataaagttagatacattaggtcctataatcgcaccaaatgtagtcataaccattgcaatacttattgccttccctttttgatgtgactttgctaaatctgttccagcgtacctagcttgaagattagtagcagttcctgaaccgtatataagtaaagcaatgaagagtatccatatgttactaagtaaggttgcaattacaactccaatcgctcctatacctccaagaacaaatccaattgaaagtcctatccgtcgtccatacttttgagataatataccaaccatcattgctgctcctgcagaacccaaagtaaataaagcagatggaatacctgaataagcatctgtacctaatatatctttagcaattaaagcacctacagtaattccagcagcaaggcctgcaccaccaaatatttgagaaacactaacaatagttaaaacttttttgtaaaatttaaccaattctttttcactggtcatcagttcaatttctttgtcgaactttgcatattcaagcctcctaaaataaaactatctattaaactaaacagtttaatagttgaatttcttttagtcaataacagaagatagttgacatacatattagaaaatattaatatgtgtgtcatattagaaaatattaatatgaggtgggtatattgaataatatagatttaaaagcacattttattcacggtctttctaataaagtgagattaactattttggagttactcaaatcgagtgaaatgaccgttaatgaaattgttgaaaaagcaaaaataagtcaatctagtatttcccaacatttagcttgtcttaaaggttgcggattagttacttctagacaagaaggtaaatatgtttattatcaaattaaaaacaagcaaattttagaattgctcaaactgattgattcagtagttgagcacactgaagatgatattgagagttgccaatatcatactatctaagaaagaagatgacatatatgagtaatgattgctgtaataataagcaaacatccaatacttgttgtacaaataatgtagtaaaggataataattgctacaataacgaaacgcatgtaacaaattcgaagaatgacaattgttcaaataatgaaacatatacatgcacaagtcagaattccatgaatcttacaaataacaaatactctgaagaaaatgacaaagttgccacctctgtctcaaattataattttaaagtgaatggcatggattgtagttcttgtgcaagaacaattgaaaaagcattaagtcctttagatgaagtgacaaatcctaaagttaatttttctacaggtaaacttactgtaggattgaaatctcaaaatgatatcaaccaagtaactcaaactgtgagaaaattaggctatgatgtagaagaaactaagactaattcaaaatatataactttctcagtagaaggtatggattgtggaagttgtgctaaaagtattgaaaaacatttaaacaatttgtcatatgttaatgatgctcaagtaagtttttctacaggaaaaatgcaagttgattttgaaggtaataaaactaaaaatattgaaaaagaagtttctaaaatcggttattctgcaacattaagtccaacaaaaaaaagtagtaattccaaatggagagtattcagaaaacctatcatttcaacattatttcttatccttggtttagttgtaactctgacaacattgccagtattaattgcaaatttaatgtatatcatagccattattgttagtggcataaaaccattgaaaagcgcatattatgccattaaatctaaaagcttagatatgaatgtgttgatgtccgtagctgttattggcgctatattcattggtgaatattttgaaggtgcgattgttgtattgttatttacaattggaaccttgctgcaaacaatttcaatagataaaacacgtaattctatacaatcattaatggatattacttccacaacagcaaatgtcataacagaaaacggaacaactactaaagatttgacagatatacgagttggtgaaaccttacttatcaaaccaggtgatcgcgtccctttagatggaacaattaccgatggaagttccagtttaaaccaagcacctattaccggtgaatcgatacctgttgataaaacgattaacgatgaagtatatgcaggctctatcaatgaaaatggtactttatacatccgggtgtctaaattggtagaagatacaacgctttctaaaatcattcatatggttgaagaagcacaagaaaataaagcaccgacgcaagcttttatagatcgattttcagaaatttatacacctatcgtctttgtattagcattattagtcatggtcataccacctctattctctttaggtacgtggggcgaatggttatataaagggcttgaattactagttatcgcatgtccatgtgcacttgtcatttcaacaccggtagctatcgttactgcgattggaagtgcagcaaaaaatggcgtacttatcaagggtggtaaccatttagaaggtctaggtactttatctgcgttggcttttgataaaacaggtactttgactgaaggtcgtccaaaggtggatacgattaaaactatagatgctaatgaaacaacattgctaaatattgctatgagtttggaatcctactcaacccaccctattagcaacgctatcgtagattacgcaatgcaattaaatgttaaaaaagcttatgtaactgattttgaaaatatcgttggtcaaggcatcaaaggtaaaataaatgaaagttacgtttatgctggtaacgtaaaattaattgagtctattaacaaaaaaattaacaactataaagaagaaataaacaaatatgagcaagaaggttttaccgtcatcattattgcatcttctagcatgattcatggcttgattactattgcagacccattacgttcaaatatcaagcaaataatacaacaattaaatggtactcacattaaaaacactataatgctaacaggagataataaaggtactgcccaaaaaatcgcacaactttcaggtattaaagaagtttatgctgaattaatgcctggtgacaaattagctgcaataaaagatttgcaaaataaaggatatcgtgtcgctatgattggagacggcataaatgatgcccctgctttagcacaaagtgacgtaggtattgcaatgggaggtattggttcagatacagcaatggaaacagctgatgtcgtacttatgtcagatgatataaatcaattaacacgtacgatttctataagtaaaaaagctaaaaatatcattaagcaaaacatatatttttctatcatcataaaattgattgcattcattcttgtatttcctgggctattaacactttggttggcagtattaagtgatacaggcgctgcgatacttgtcatacttaattcattacgcttattaagaaataggaataacaattaaataaaaagaagaactagggcacaaaacctagttcttctttttttaattagtatgccatcacaaaacataactaaattgaattgatttgttaaaaatcaacagcgattaattgtctatagatctatttaaatattaatatcatcaccaaaactctcttatttcattatatcttttcaaattgcataaagttacacactaaccaatcttagctttatttattataaggctcagcgtatcgattaagagtgaggtacaaaatataacaaccctgatcattagttctaaagatcagggctgtttggatctattttattttaacaataaattcgtaaagattatttatatcatctaggttctgattacatttaaaactgtcataacaaatgtaatctccttttttagtatatgttccactactcttattatgtttagttttattgagaaagagtgatgtatcagattcctgattacaaattttacagaatccttttactttatttggtgaaatttcgccatatataccttcgaatttatcatctaaatttttataaacgatatattttcggttagaagaattatcattccatcctaaatatgaaatttcttttgtatcaattaaatttatatctggtctctttaatttttttactttacgaaaaattttctccagttgacttgatgaaggtatttcaaaatcttggatgtacacttttaattcatttaaaagatgttctgcttttttcttagttaattttacatcgtcaatcgatgtaataaagtccgagatatcaatatctttttctttaaagatatcattaatttcatttagtaaaaaatctttttgtgttttatgggaattcatatcgtttgtacgatataacttaatcaattgatatactaactgctttactttaacaaacttatacacttctattttattcatttcatattcctccatttttgttgaagtactttgtgaaatgaatgctattcataactaagtacttcttatctttgagttagagtactatagcgtatgatgtatgacatatttatatgtcgcattataatcagctcctataaaaatcttccacactatcttagcagatgattttataaaagtgaataaataccccttaaaatatctagtggcatatttatacttatattatattcagtaactgctcttttacttatttcagcatccgaatcaagatttatcacttcaaactctagtatctaactggatataaatggaattcaacagttactcccgcttctgttaatgctcattgtcttatctcgaaaccgatcaagtgatccgactgtcgtatgtgtagatggtaaatcactaaagtctgtttcaagaattggtactgcatacttcggtgtatctccttcaacacctttaagatacatagaccatgcaaactaattcaattctttactccatactcccttatcattaatttcattacttgattatgttatacatacattattgcattatagcttcattcactatttatcattcccaatctttattacataattctttagcgatttgttcggtggttaagcaatccctattcaaaatttcattcacattaaaatacttaactcccatcgatccacctttagatgttttcttgtagtctgtctctataaaatcttcaattaagtaataataatggggttcgttcaatagattagtccacttttctttcccaagcaccattattttatttttaactatttcatactcatcaatcgataactcagtacctacaggataaactgtcttcaaggataatgagctctcatttatttccgtcactattactttgtctacttttccgatagcttttattgctttgtctttatatagcccaatgtattctatcggcttgaaactgtaacctcttttttcagcaggatgaaagtaaatattatgtttaaggttatcatcaaatgagctacctaaaagacacattctcatccttccctcaatatcatcttgaatcgtctacacttaattggacatattataagagaatcaactagaaaatattggataactattactacttactttaaatgttattaaggaaatctttgacttcatctttatgaatcatatttttaattggtaatgcatctaatactgcttctttatgcttataaatgggtttattcattcttgaatctaataacactaataaacctttatcctgctttgttcttactaatcttcctacaccttgtttcagtttaattatcatttcaggaactataactgcttcattactatcatttaatttagtaatcttatattttgtaattggatcaatcgtaggaaaaggtaatctgacaataactaataatgttaataattcattttttaagtctattccttcccaaaatactcccgtacccaatattacacctttagtttttttaaatgattcaataatttcattttgacttttactaccatcatctacatagatagttttattaaatttcctttttgataaatcattatatacaccgtcaatgtcatctttagcagtaaacaatatcaaagtgcctcccttattttggcttgccaattcaaaaatatgtttacctatttcttcataatatttaacatcacgtttatcaaattttggtaagtttggaggtatgtagagcctgctttccttgtacggaaaatcattatacttaatatcttcctcatagcctttaaaaccaattatttctttaatgtactcatagctattttcattattagttttattagtaattgttgcagaaagacatacaactgggtaacttgtactaaaaactgtttttctaagtgtttcagcaatattattgggacaaaatgaaatatcaatttggtcttgcttagttatttcagtccaaaatatatatttgtcgctgttattttgaagatttttaaataatgttaacagattattagctatttctaattgttcattactaactaacgaagattgtttaaatacaacaatattattaacatcgaattcttcaactatttcctttgtcatactaattaatttggccatttgatgatgactaacaggttttatatcaactcgtccagtagataaacaattaccatttttgtatatctcacttttggcactatccttttgaagattaaaccaatcttcaatcatttttatattttttaaataccgagatctactaccaactcggtttgcgccttcttttattttatttatcatagttttagagttaatagttttagtcatgttagcacgttgtttctcttctaagttgtgaacttcatctacgattagcatacaaggatcatcatagattaaactctcttttccaaaggttaactttttaaaattcatcattaacatatcttgattaacgattatgactttcggcttatattcattgagtctaatatatctatttccctcttttaacttatttctcattttaaaataagcgcattcatttttatagtgacatttactcataatacaattattggtagatatttgattccattttaaattagtctcacgtacagtttgttttgttaaaccattatttgctatatctaaagcctccattaaatttaatttacttaaatttttacgatgaatttctttaaaacaaggatagttagttacacctttacctactatacaatcaacagatatatgtaaaatttcttcaacttgctgtatatcattgactagttgctcagttaattgaattgaggaagtcgttacaattaaaggttttttagtactttttgaaatcaatataccaggaattaaatatccaaatgattttcctatacctacttgcgcttctactattaaattttctcttgaatcataagcatcaaatacatcatacattaaagtttcttgcccataccttgtttcccagcctttatttttcatattttcaatagcctttgttatatgatcgaatataatttgattactctcattcattacatcaccccataatcaatttaaactaattatacactaattaagaacacatgttctttttacaagtttttacttgtagataatgtgtttaagttagttattgtatccaataagattaagaggttctgttgcaaagttgaatttatagtataatcttaaccaaaaggagtcttctgtatgaactatttcagatataaacaatttaacaaggatgttatcactgtagccgttggctactatctaagatatgcattgagttatcgtgatatatctgaaatattaagggaacttggtgtaaacgttcatcattcaacggtctaccgttgggttcaagaatatgccccaattttatatcaaatttggaagaaaaagcataaaaaagctaattacaaatggcgtattgatgagacgtacatcaaaataaaaggaaaatggagctatttatatcgtgccattgatgcagagggacatacattagatatttggttgcgtaagcaacgagataatcattcagcatatgtatttatcaaacgtctcattaaacaatttggtaaacctcaaaaggtgattacagatcaggcaccttcaacgaaggtagcaatggctaaagtaattaaagcgtttaaactgaatcccgactgtcattgtacatctaaatatctgaataacctcattgagcaagatcaccgtcatattaaagtaagaaagacaagatatcaaagtatcaatacggcaaagaatactttaaaaggtattgaatgtatttacgctctatataaaaagaaccgcaggtctcttcagatctacggattttcgccatgccacgaaattaggcatatgttagccagttaagggaacaacgacatgataaaatagtaattagctatatttttctaactttgcaacagaaccgtttattatatattctagatcatcaatagttgaaagtgatttattaaacactctataaacatcatatgatattgcaaggtataatccaatatttcatatatgtaatccctccacatctcattaactttttaaattatacacaacttaatttttagttttatttatgataagcttctccctatcagtgattttgctaaaaaactttcaaagttattatttttttaacaaatactttagaaaatttttattatttaatattaattttatttaaattttaaagttttttaaatactaataatgatcgtgcagcaaataatacagaaacaactattgtaaccaaatcggagctagactgttcatctgtttctggtaatgtattattcttaacttgtatttgagtgttattacttgcttgaataatacttaaattctgtaattgattactctgtgttggttcattattgtcaattgtttacttttaatccccattattcgcactattagtagatgatgttaaatattgtttttttgttaatggacaacaacctactttagttcattcttgatagtcagtcacagctatagctccgggccagtttttactaaaatatctttataaagtttaacagctccattcccatgttaagacttattacaatgaaaaatcacataataatcttctttatactcattttttaaatttacactttctagatgataaccatgttctttcatagcactaattctgatatttgtagcattattaggcgttactttactttcaaccgcttatgtttgctgtgttcctatcctactaaataataaaacacttactaaaataattatgacaaaaatatttgttttatatcttatttcaaatttaattcctatttttggttttcttctttttaatttcttaagtagcaactctcgaattgcaatacactgcatccaatcctttaataatatacgttccattcactgttattcgtatttcgtattgattttctaattccaacttaatcataaagaaattatttgtatgaaagttatttttgtttctgcttattttgaaattgaatgtcaattaattgcaaagataatgaattacagtttaaatcttgattttttgttccccttttttgcagaatattttatcaaaccaaatatattttttaatacttattctctattctacaggggttatcgatttcattttaaccaacccaattgggatcatcaagatgaggttctcgtcccctgttctccggggtggttatcgaataaatatggatcaaaattctatgatgctcgtttcttcccgttctcgtcccctgttcttcggggcagttatcgatcgtatttcctattcaaatcactacaaaaactactccgttctcgtccccctcttttacggggtggttgtcgattcagaatgactatataagccattcacagaccatttaagagccattaacggttaattagtataatataaaaccttagaaagctattaattggcttgtatgggctttatatgtgcttattaggtggtgttgctgttcctgcacaaataaaaaggctatgacttaatagccatagcctaatgattatatattattgttccattctttattattaagtattgcttatatttatttacattagtatgaatatgaatctcatcaccttttaggtgtgctacgtgtgtccctttgtatgggtgttgtcttagtattcggcgtttatcaaataactttatatgatagttattaggcttgataattatgtccatagtccatatggtttccataggtcgagtgtttccccaatgtatattggtttcgtttactcgagcccctgcaaagtttagggcgttagctaagtcatagcataactgctcttgtttgttttctttaagtcttttcttaatcattatttatatcaatccttttcaaatgattcttctgttttagaactcttccacttcttcagccatgtcaaaatattgttcttgttctggtgttgtttcttgtccttgtttgacaagaatccagttgctttctagtacatgttgaatcatgccagtacgttcgtgtgcttgttcccagaagtcttttgtgtaacggtctatatcctcgaaaagtacctctattatacggtggtcttctgttctacaaccatcgaaaagttctcgtcccctattcttcggggtagttatcgacctattggaggacaaaacaatgaaagcgactaaagcagttctcgtcccctattcttcggggtagttatcgacccgatacttcactaaatagcataaccattagggttcaattattattttggctgtcaaaaaatgtgacaactaacgacacactactgtatagaatgtcactttttttgacaaataatatgatgacttttcttatattaacagtatactacatttaacacgctaataattaatcgtgtgtaaaacttaataaaaatttaactttttcttcctttttaatttaaaagaaaagataaaattagtacctagataatagtaatataaatttccttaatttttattttttgagagattgcttattaacaataatctgaaaaatttctatacggtttagaaagatcagtcacatcacacgagaatagctcttctgaatttgaataaacaaaatagttaaattttattcggtctataaatcgattgtaaaatctaaaggacagaagccaatttcgagtatttttgtgttcataagctttctgtccccttattagtggttttactaaaaaattatttttacgtcattttaagtaatattataaattcttttactttaagtaataaacgcttataattacattacttaatacaatttgttattaattaaaggaggattactaatttgagtataattaaatcgtattcagtaggaaatggtgatatgttttacattaaacacggtacagataatttctctattatagattgctgtttatataatgataaaaaagatattataataaaagaaatattagagatagcttctacaaaagaaattgttagatttatatctactcatccagatgaagatcacattcatggacttgagttattaaataaaaatttaaatatcactaatttttattgcgtaaaaaataatgctaaaaaaaatgattttagtcaaagttttgaagaatataaaaaattgagagattctaacaaagttttttacatacataaagatagtcaaagaaaatggatgaatattagcgatgaatcacgaggtagttccggtattaatatattatggcctgatacagacaatgagtattttaaaaatgaattacaaaaagcagcagaaaaaatcagttttaatgatatatctcctatcattcagtataaattagataaaggagtaactgctttgtggatgggagacttgactactgattttatggaaaaaattgaaaatgaagttaactgggaaaaagtggatatattatttgcacctcaccattctagaaaaagtggaagagtaccgagtagtatcttaaataaattaaaccctaagcttattgttgtaggagaagctaactcaaaagatttatactattatagtaattatactacaattactcaaagaaaagcaggcgatatagtatttgactgtcaaactggtactatcaatatatatgtgagtaatttaaactatgaggctaaaaatcttgaaaaagactctaaaattcccacaatttatgataatttaaaatatattggaagtgtaactacatacaattaacttttaaaatcacaattagctaataaagattgagcataacgttttgcagattttctagtctgtgttttagtaactttaaaaatccaaaaatacaaaaaaaacacgttaataatactagaaagtactagttgaatcgtatcattttcttgagatagtataaaaacaacaatactgaatactatagatattaaaacaattataataccaatatatttaattcctaataaattacgatagaagccatattccatattatgttgagcagtcatataatcttctcttgtattttttaataaccaatcaattgctgagtcgtactcatcatcaaaataattctcttttttgtctctagcatcttcgtagctaggaagttctatacaaggaacgttttcttgtaaaaaagagtgatacctttctttggtttttatatttaaagtgtcgtctgaatatcttaaaatttgtgtagtgggataaacatttgatgattgagaaaacaactttttttcaaccattttaccattttctcttgctatgattgaaaataaatagatataaaaaatcaatagaattattacaattagactagaacctaaatttaaactatcaggaaaatatattatcaaggtagtaaagaaagacatgatacttatcattcctggagctataatagcttttaattcatatttattaaaaaatatcattaaaaattccttcataatatttttctctcccattattaaatattgtttaaagttaaaaggaggtacctctcctttttctatttgttttcaataaatatttattatttatcatagtgcttttgatacagaaaaattttgacctaatattcataaaaaatttttcaattaacaatggcaacagtatcttcaataaccacagtcttcacaaaggtatgaatatgaatcttcacatttgtaacacacctctaaatcttttatcgtatcgttttaatttatattttttattcattttaattcactcctgtttactaatttaagataataataatctatatttttttgatagtctagataaattaaatattaataaaatactacacaatcatcttctattttttgctatagttgatttaacattaaatttaagaggtgttattaatggccactataggttttgaagaaaagttatggcaagctgccgataaattgagaggaagtatggatgctgctgagtataaaaatgtagcattaggtttaatctttttaaaatatgtatcagattcttttgaaggaaagtatgaagaattgaagcaagatccttatgctgatgaagaggatcaagatgaatatttagcagaaaacattttctgggttccaaaagaagcaagatggcaatatattaatgataatgcgaaaaaaccagaaattggacaaatgattgataaagccatgattgcaattgaaaatgaaaatgaatcattaaaaggtgtgttaccaaaagaatacgcacgacctgcgttagataaagaaaaattaggcaacattattgatttatttacatttaaagttggcgatacagagagtcgtaaacaagatgtattaggtcgagtgtatgagtactttattgctaagtttgcaagtgcagaaggtaaaaatgccggagagttctatacaccatcatcaattgtaaagttattagttgagatgattgaaccttataaaggacgcatttacgatccatgttgcggttcaggtgggatgtttgtacaaagtgaacgcttcgttgagaaacatcaaggtcgattagacgatattgcgatttacggacaagaatctaaccctacgacttggaaattagcaaaaatgaacttagctatccgtggtattgataatgacttaggtgaacgaaatgcggatacattccataacgatttacataaaggattaaaagcagattatatattagccaatcccccttttaacgcaagtgattggggtcaagaacgattacttgatgattaccgttggcaatttggtattccgccaaaaggtaatgctaactatgcatggattgaacatatggtttccaaattagcacctaatggtatagcaggattcgtattagccaatggatcgatgtctacaagtggaaaagatgaattagaaattcgtaaaaatctaattgaacaagatttagtggaatgtattgttaccttgccaggtcaacttttttattcaacacaaatacctgtctgtctttggttcattagtaataataaaggtcaaaatgataaaaaagaacgtaaaaatgaaattttatttattgatgctcgtgaaatcggtcatatggtatctagaacattaaaagaattttcagatgaagatattcagaaagtagcacaaacttatcatgcttggaaaggtacaaacgataaatcctatgaagatatagctggtttttgtaaagtagctaatttagaagaagttaagaacaatgaatacattttaacgcctggacgttatgtcggtttagccgatgttaaagaagatgaagaaccatttgaacaaaaaatggaacgtattacttctgaattaagtgaacaattcgcaaaatcaaaagagcttgaagaccaaatccgtaaatcattggagggattaggttatggagtataaagaaattctattaaaagaccttgcttcaaaaataggtgatggtcttcatgggacgccttcttacgatcctaaaggcgatttttatttcgttaatggaaataatttagaagagggtaatatcgtaattaaagacacgacgaaaacagtaaatagagaaacatttgaaaaatataaaaaagatttatcaaaaagaaccttattagtttctataaatggaactattggtaagatagctaaatttaataacgaaaatatagtacttggaaaaagtgcatgttatataaacttaaatgatactgcagataaaaattatatttattttttactaaaatctagagaatttcagaattatatacaacaatacgctacaggaacaactattaaaaatgtatctttgaagactattaggaactttaaagttaaattacctgctctaaaatatcaaaatagagtatctacaatattacaaaatatagaaaataaaattcaattaaactacaaaatgatagcaaaccttgaggaactatcacaaactttgtttaaacgttggtttgtagattttgaatttccagatgaaaatggtaatccttataaatctagtggtggagaaatgattgatagcgaattaggagaaatacctaaaaactggaatgttttaacaataaatgactttgcagatgatttaattataactggtaaaactccaagtacaaaaaataaagataactattctgaaaaaggtattccttttctaacgattccagatatgcatacagatgttttttcattaaatacaattaaatatattagtgaagtaggaatagaaaaagttaaaaataaaataattcctgaaaattctttatgtgtaagctgtatagccactccaggtttagtttctatcacttctagtgagacactaactaatcaacaaattaatagttttacacctaagaaaaatgatttatattatttatatttttatattaaaaatatgaaaaaatatattgaagacttaggtagtggtggtagtgcaactttaaatttaaataaaacacaattttcaaaaataaaaatcattagacctataaacgacttattaaaaaaatttcacaaatgtgtagattctaattttaaaataatacttactaaacaaaaagaaaatttaaaattacaggagttacgagacacactccttcctaaacttatgtctggtgaaatagaaatacctgataatgttgaggtgaataacgatgaactttcaatttaatgaagatgatttagaacaagtcgcattagagtggttagaatcactaggctacgactataaaaaaggtaatgaaattggtatgacaggtctagcaccagaacgtagaagtgataaagaagttgtccttcatgaacgattagaaaaggcattaaaaaatattaattctgacgttcatcctcattttatcgaaaaagcgatacatgaattaacactagaaaagtcacccaaccttttagaaaataaccttacctttcatgaaaatttgattaatggtattgaaatcgaagactacgatgacgaaggacaatcgattgtagaaattgttaaaatcgttgattttgaacatccacaaaacaatgattttttagcagtcaatcaattcactgtcgttaacggagactatacaaaacgtcctgatattgtcctctttatcaatggcttgcctatcgttgtaattgaacttaaaaattcaacgaatgaaaccgtgggcgtcgaagatggttatcatcaattagaaacgtataagatgcgtattccacaattatttacgtttaatgaagtgcttgttacaagtgatggtattaatactaaagccggttcactaactgcaaactatgatcgttttatggcttggcgttctaaagatggagaaacggaatcatcatcaagtttagctagcttagacgtactgattcatgggatgttaaatccagaaaccttacttgatttaattcgatattttgtattattccaagatgatggtaaaggacatatcagtaaaattctagcagcgtatcatcaatactatgccgttaataaagctcttaatagagctttattagcttcatctgggcaaggtgatggtaaaggcggcgttatttggcatacccaagggtctggtaaaagtttaactatggtctttttctctggaaaattaattcaaatgcttaataatcctaccttagtcgtcgtaacagatcgtaatgatttagataaccaactgtacagtacatttgttaaatcgaaaggacgttctggtaaaggtttattaagacaaacgccaaaacaagctgaaacgcgcaaagaattaaaatcgttattatctgttgagtcgggtggtattgtatttacaaccatgcaaaaatttgaacctgaacaaaatgaaacgaccatggatgccctaacagaacgtaaaaatgtgattgttatggcagatgaagcacatcgtacacaatatggctttaatgcaaagtacgatgataaaggcaaaggcattaaatatggttatgctaaatatttaagagatgccttaccgaatgcaacattcgttgggtttacgggtacacccgtagcttcaacggataaaaatacgcaaatggtctttgggaactatatcgatgtttatgatatgacacaagccgtagctgatggaagtaccgttaaaatttactatgaaagtcgtgtaattccattaaatctacctcaaagtttagatttagatgaagcatataatgacattactgaagatcaagaagaggatgtaaaacagcgtttaaaatcaaaatggtcccgtattgaagctttagcaggcgcaaaacctcgtgtagaagccctagccaaagatatcatccaacactttgaaacacgtcaacaagcgatgaaaggcaaaggaatgattgtaacgatgagtcgtcgaattgctgttgatttatatgatgaaatcattcgtctaaaaccagaatggcattcagatgatgatgataaaggagtcattaaagtggtaatgacaggctcatctagtgacccaacttctttccaaagacacattggtcctaaaaaacgccgtaatttattagaaaaacgtatgaaagatgtgaatgatgaattacaactcgtgattgttcgagatatgtggctgacagggtttgatgttccttctatgcatacgatgtatattgataaaccaatgaaagggcataatttgatgcaagcaattgcccgagtcaatcgagtatttaaagataaaccaggcggattgattgtcgattatgtgggtatcgctgaaagtttaaaagaggcacttaaagaatatacagaatctgatcaagctcaaacagcgatagatacagataaagcggttgaattgatgttattgaagtatgatgtaattcaagatatgttatataatcttgattattctaaatttaattcagataaaaaatctgaacgctattatacaatatcgaatacgatggattatgtgattggtttaggcgaagatgaacgccaacgttttattaaaacagtcacagagttagggaaagcctttgctctttgtgcgactgaaccaacagctcaagaactcaatgatgaaattgctttctttaaagcggttaaagcaggacttgttaaattattacaaccatcaaaagaaggaaaaacacgtaaaacatctgcagaagttgaagcagagattaatcaattggtgtcacaatctgttgtgactgaagatgtcattgacgtttatcaaacgctaggtcttgaacaaccggatttatcaatcctatcagatgacttcttaaaagatgtcgaaggtttgaaacaaaaaaacgtggcggtagaattattaaatcgattactcaaaggacaagttaaatcattaatgaaaacgaatgcaacggtatccaaacgtttctctgaaatgttaggaaactcgatcaataaatataatagccgttccattgaaacatcaaaagtgattgaagaactcattcaactcgccaaagatattaaacaagaacaacaacgaggaaatgaattaggtctgaattcagatgagattgcattttacgatgctttagcttcacatgaaacagcaaaagaagctatgggagataaagaactacgtgcgattgctcatgagctaactaaaacagtgaaagaaaacatgggtgtggattggtctaaacgtgatagtgcaaaggctaaaatgcgtgtagctgtgagacgattgcttaaaaaatatggctatccaccagatttacaaaaaatggctgtcgaacaagttgtcgagcaagcagaacttatggcgagtaatcaataaaaaataaattaaaagagcatccctcaccgcaaagtgaaggatgctcttatattaaggaagataattcatatatacttcattcatttattttatgactaaaatcttttctgaaagcatcgtatggacctttataaagagtactttctttagcatgttggacatgacgctctttatcttcatcgcttctatcatcaatataatcaataaattctcctgttcgcttatcaatggttacagcagctttcataggataaccctctgcatcttgagaagtaaatttgatagcataaacattattatcagttctagtagtatctatacgatagtcatttcctgttcgtataggtggaaactcatcttttactttttgaatagcttcattttctgttattatttgcagatcttgttgtgaacttgaattattattagctggttgattttgttctgtttgatttatagtattttcttgagatgattgtttagaagtatctgattccttcgaacttatattatttgaatcagtatgagtattttctttctgtttatttttctcactattttccccatcgcgctcaatattaattgtacaagcagatagtaaaaaagaagttaaaagtactaaactaactatatattttttcataaagtaaatatccctccattattttaaattgtacgatacattttaaataaaattaaatatatatatattgaaaaatagcaaaaaaattaaatagagagcatccctcatcgttaaagtgaaggatgctctagttttattagaatataattttcattttgataggtaatggttaatgattatctgtaaatcattattaagtaccgttgttatagagtcatcattcataaaatcatcatagattttatccagtatttcttcatcgtcaatcgttgtgaaatgatgtactaatccttttacgatcgatatataattttgtgatgctaaacaattagcaaccgttcgccagtctgattgcgtggtttcatggttcatagataatcctcctttatttcaatgtccatttttgacgtgttttaggattgagtggatgcatgatttcatttgttactggattgatgagttttttaactttctttttatgtggttttaacatttccatcacttgttcaacacgttcgatgacaacgggtcgcttcgcataggctccataagcaagaatcactgtgtcactttcacttatcgctttcatcaagtgaatgtctgtgtgctcatcatatggctctttgatatgtttgaggttctctggtgttttaatattagagaatagatttacaagatatacagcatcatactgttcagaattcgctaattggttaagaatgagaacagtggtaagatcgagtgataatacgccatctaaatgaggatacatcgttatgactgtacatgcgggttttttgttatcccatgtcttttttagtaaatagcggtgttgttcatcgtcgctaaatatagcttctgtgtgtatcgcacttttgattgtactcattatcgtcactccttttagtattcttctggtaaaagcatcacataataaaaaacgtctacatcatcttcacgaataacgtagactttcttaggtaatgcgtgacgaattatttcttcacatttctcttttatttcgaatgcttttaaatgatatagatagcatcaaatattctatagtttcaataagcatgtattttattcaagtaaacaaatatagttatatattttaaatatcttcggatattaaagagaaatattttaataaacaaagataatttacatcacaaaataaaacgatttcaaaaaagaaaataattataaaaaataggtttctatggtattaaatttgggaacattaaaatttagaaagtgaattttaatatatttaaaaattaaataaaaattttaagattcttttaattctataatttaataataactaaggaggtgtgtttagaggtgcatagatttaaaaactttatccttggcctattaatagttgcgattgttggtttcttactgtttatgtacatagatgatagtcgtattaaacgttatcaagattatttcttgcaattcaattggttccaaccattattaattggtttatcagctttactcgtgttaattggtattatattggtatttagcatctttaaaccaacatatagaaaaccaggtctttataaagattataatgatggacatatttatgtatcacgtaaagcagtcgaaaaatctgcatacgatacattaactaaatacgatgaaatcagacaaccaaacgtggttactaaactttacaataagaaaaacaattcttacattgacattaaagctgatttcttagtgcctaataatgtgcaagtaaaatcattaactgagagcattagatctgacattaaacataatgttgagcattttactgaaatgcctgttagaaaattagaaattaatgttagagatcaaaaatctgctggacaacgcgtactataagggagggataacatggctgataataatcaaaatagtcaagattcaactcaacaaattatcgacttcctaaagtcgtataaatggcgaattataggttgctttgcattcttaattattgcaatcttattcttgactttaggattctggaaaacaattttaatcattgttttatgtttaatcggagttggtattgggtatataaaagattgtaaacaagttttcatgaactttttaaatcgatggagttaaacctcattataaaaggattcagatgaataaaaattaatcattaaaaacaaaatctttatttgaaaaggagaactataatggctgaagataataataaagctaagcaagcatacaataatcaaactggggtaaatgaaaaagaaagagaagaacgtcaagaacaagcacaacaatacagagaagaacgtcaaaataacgaacaacattttgaaaataaattaactttctctgatgaagttatcgaaaaaattgctggtatcgctgctcgtgaagtaagaggtatcttagagatgaaaggcggtttcactgatagtatttctaacgctttctcaagtggtaataacgtaacacaaggtgtttctgttgaagttggtgaaaaacaagctgctgtagacttaaaagtcatcttagaatacggtgaatcagctccaaaaatcttccgtaaagtaactgacttagttaaagaacaagttaaatatatgactggtatagaggttgttgaagttaacatgcaagttgacgatgtaatgactagaaaagaatgggctcaaaaaaataaaaacaacaataacaacaataactccgaaaaatcagatttacaataatcctattaataaaacagtttaggatataaatcctaaagaattgtcagtaaatgagtttaatataaattcatttactgattttttatttataatatttcgtattgttgagaattaaataaattcaattgttttgtaacctcaaaaatgtctccaatttacaacaataagatactcagtaacatcttataaactttatgatgttactgagtatataaaataattttattatattaattaaaaatctaatatttttagaaaattaaatatataaaaggtaaaattagtaaaaaaaataggtataagaacatctttcactgcaaaagtgaaggatgttctagttttattagaatataggtttttattttgatagatattggttaataattgtttgcaaatcattattaagtaccgttgctatagagtcatcattcataaaatcttcatagattttatcaagtatttcttcatcttcaatagctgtaaaatgatgtattagcccttttatgattgatatataattatgtgatgctaaacaactggcaactgtgtgccaatctgattgtatcgattcatggttcatagataatcctccttttatttcaatgtccatttttgacgtgctttagggttaagtggatgcatgatttcactcgttaccggattaatgagctttttgactttctttttatgaggcttcaacatttccatcacttgttcaacacgttcaacgacaacagaccgcttcgcataagctccataagctaaaatcactgtgtcactttcacttatcgctttcatcaagtgaatgtctgtatgtttatcaaaaggttctttgatatgtttgagattttcaggtgttttaatattggaaaatagatttacaagatatacagcaccgtattgctcagaattggctaactgattgagaatgagaacagtggtaagatcgagtgataatacaccatctaaatgagggtacatcgttatcactgtacaagcgggtttcttttcatcccatgttttcttgagtaagtagcggtgttgttcatcatcactgaatatggcttctgtgtgtatcgtacttttgattgtattcatatttgtcactccttttagtattcttcgggtaaaagcatcacataataaaaatcgtccacgtcatcttcacgaatgacgtagactttcttaggtaatgcattttgatttttttcatagtttgtatagtgatattctaacttgtatgcgggctgttcttgttcatgtgtaattgacaacatattatcatcttcttgtagtttgaaaatgtgtaggtaatcggtatgagactggttatctttttcttctaccatgtgccaaagtaaggtttgaaggtctagtggaatactttcattaattcctcttgtgatgtatcgattgatgttcatactattttcctccattctgtttttctttcatgatctcaatgacttcattgataactgtgacagatagttgagcgaccttgatccagttcatattacttgtctcctttttgtaataagtagcgttcatcaataataatttgatgagtgtcatttaaaaatataaagtctaaatcaaaattatctaaataacctattgctactaattccttatctagataacataaaaaaggataaatgctgatttcatgtaattcatcattgtaataggtaaaagtatttaaaattttatgttcaagtggactatttttaatatatttttcaggtaatacatcttcagccaccgcatctacgttttcacaagcccaattttcttgataatttaatttaaatcgttcagtaatatacgttttaagttgtttgcttagcgtcattataatgacctccttaattaataatttgtactccataaataaaatatatatttataaaatatttcaaaattcttccacttttgtcactctaaaaaagtggtgaaagtgataaattttcaatcttatttccatttgtgacatttatcacaaagttaaatttaggcataaaaaaattcccacaatcctttttaatagattgtgggataagactttcgtcaattttataccttacaagttttacttgtttatctgtcgtaatttcaattgaatcaattaacattttcataagttgatttttagcttcgggtgtagcctttcttaagtacacgctgaatcgtgttatcatcaaaatgagtcgtccttttaatttatcaaaattgggtatttcatcctgtgattgatttgcttgttgcgcttctttaatttgttgatctaatacttctaactgttgattcatttgactttgtttatctttcaatatttcgctatctatttcctcatccaaatataaatctaataatcgttcttgttgtgttttaagcttagctttttgtttttctaaactatcaatgtcatatttaatttctgtttggttactatgcttttgtttcagttcttcgagcacatttgacgcaatctgcttgataatatctggttgagacagaatacgattcaaatgaacattaattacacgctcgacgacttcagcattgatggaattactatgacaagcagaactcccagaacggttaaataatgaacaaatgtaatagcgtttgattgttcgttcttttgactttttcgttttataatacgtccgtcgacataccatattatttccgcattctgggcatttaataaggctacgtaagtagaaatctccaccaataggtcgacccggtttaaaacttttagaagctagtttctcatgaacttgatcaaatacatcttcacttataatggcttcatgcttacctttgaccaatatcacatcattttcatcacttttaccacctcttcgctgaactgcccagttttgatgattattaaatctaacaaaacctttatagactggattattcaaaatatatttcacgccgaacactgaaaatggtttttgattaatggtgcgatatcctttttgatttagaattgtcgtgattgctttaagtcctttattgtgattcaaatataaatcaaagatttcccgtacaatatgagcttcattttcatcgataaccaaatcatttttttgtgtaagtgggttaagtgataatgtgtagcctaaaactctacctgtgattgcctctccactccgtgccttagcattcattgaaaattttacattcgaaatcaaagtctggcgttctatagatcctattaacccaaacattgtaacgagtacttctccagaagcattggatgtatcaatattctcagaaatcgatttataccctacgccatgttctttgaattcatgaataatattaaacacgtctctcattgatcgtgagacacgattcaatttccaacttaataccatttcgattttattatccttaacatcttgtaatagacgtttcattgctggtcgaccttcaatatttttacctgatataccagaatcgatataagtttcatagtcataacctggatagttttttacaacctctttgataagcacttgttcttgttcatggattgagtacccatgctccgactgctctgacgtactaacacgtgaataaagtgcaattttacccttcatatcataccgctctccttttattaaattattgctacagattactggtcttgtaacatcatatagataatatatatttataatttcgtttcatttttaacacttttaccactttgagaaagagatagattcgaagatgaacctatcattcaaagtgtcctcactcattttatgacttcaatctttcttctatcataggcaataaaacttctacaaaagcatcaagttgttcttgattcatagctcgtcatcctcctctgtaacccaatcatcttgtatatcttcattatcaatttcattaatttctttatcatttagaatgaaattattttcttcttgtgtcgttttccaacccaagtcaatccaatattcatatccatcattaagcactgtatcagtatcaaaatttaacttaacgagttgctttatattttgactacttaaattatttgttttcttaacatatttatttaaagcagatactttaagtcgactactctcttttttaactatcgtatttctaagtaatttaatacattctttttgcttagctcttgatgtgttagacttatccatgaatgtataaccgaagttaagccaatcatgagtcagttccgttactttttcattttcaattctattgatatcatcgatcatcatttgtttatatatatgcattagatataaaaagatatctttcttctcactttttaatttgtcatttaaatcaatatcagctttttttacgtaataatcacaaggtataacagcaattcttcgttctaaagctttcgcatgttctggagggaaattcagaacggcattcgtattaaacagaagttttaaatctaatgtgacttctacttgtgtgagtcctttacgatcaacatgtatgggttctactgataataattttttgaaatcattaacggttttttcgtcaattcttgctttcccaatttcatcacttgccatcaatcgcttaccaattaaactttctttatcaaatcttccacccagttcgtttaacgtcttagaaacaacatcttgccgatagaagaatgatctcattaacttgatatatacagatttgccattatttgctgtaccataaaaaattagtcctcgtcgtaatttacgatttgatgtgagtaatacagccgtatgacgaattaaaaattgttgtaaattagcatcaaaattagctaattctgacatatatttatcaaaatgaggcggtataaatgaagtaatactatcacttttatctagttctacatctaatctcgttttcggaaagatatcgattgagttatcaatgacttgaaattgttctaaatcgaataaatagtgatgacaacctatatatcgttcatcttctactaattcatctatatctgcggattctttcatgccgtctatgacactcttcaattcgctttgggttggggtataatcaattaatataacctgaatagttttcctaactatacttcttaattcactatcatctagcttttgccatccttcttttgagaacacaaataaatttgaatcaaaacgtttaacattcaaaacttgtgttgccatttgaacaagatcagtatccttaggtttattttttataccgtaataactgtaaatatttgaacgataattaatatcagtgcttatttcaaagttcaattcttcaatcaataagttatatattgctttagcttggggtaaatcttcctcattatcgcttgtattttgtgattgaagaagtgcaatcagaccattacggtcgattgcctccttattttcacttaataattgttttgctaatttcatcgtattattcatttactttatcctccatcatattttctaatggtgctacatcgtgtacaaaataactacctttgtatttaccaacaagtattaaatgtttatgatctatataagaaccgtattcagtatgactaggactgtagttactatggctttttagccactgaaaaatagagatttgattctcactagggtttaaagcaatacttcttcgaatgttatatatttggtcatgtaaaactacttcataagtaaatacatgcttgtcatcttcaacatttgatggttccacagaatacagttttgcaacgtaaatgttacctttaactagcgctgatgatgatggtattgataaattttgtcctctattatttatcatcatgatttcctcccatttgttcaattgtggtatgagcaaagttatctccaaacaagcgattggcacttgtttccattaactgtctaacacgctctgcaacttcttctgtattgcactcaatcataatggcatcgtgaattggaagcataattctgaaatcttcttgatcacactgatgctgatatactacccataagatattcttaaagatataactagaagctgtttgaatatataacgccataatgctgtttccatggcaatgtttcatatcgtgagtgataccataaggcatcttcactgtctttttattatcaatttgttcttttagcttgattacattgctaaatttgctcattgccttattccattcatcttctgatatatattgattcaatttaaatttgtcactcatgtaatttccaccaaacaagaatgaacctatgaatgcacgcttcacaagcttacgatgagtttctggaagagataagtcattgagtaatgtgtcatataaaccttgactgccattgagatactctttcaaatgatcatcatctgccaaataagctacaatagatggctcaaacgccttgaaatcaatcataaataccttattaaattgcgttggtagtataagttgcttcacttccttagataacccttgaacattaaaccttctagtcgttatacgatgagtgcgagtcccaattaaagaaattttagtattcaacttttgattaccatcaatggctaattctagtgcattgaagtttttatctaatttttcccaatgactatcacttttagctttatttaaagattgagtttttactttagacagcatttgagtatttaatttaaatccattagcttctatatcttgttttagaggaactagttcctgatgaatatgaacatatttgtctaactcagttttatcctctggagcaagatcgttacacttttcttctgaagaacgaatgaactgctcctttaatttcaaacattctaattgatctgatttaagtttaatcaacttgcgttttagtactttctggtaaaaacactattttcattctaaaattttctgaatctttacttttactattattcatcatcctgatacattctccttcttttatctatttaataatttaattttaataagatggtctcaatgctattattaagcattgagacatgtaatttttatcttttaaatattttatatttaatgttgtcctcctcacctaactcatacaaagagcatcgacattcaaaatacaaatcaaaaagatgattaattacaaaaatttcctcgtcgtaaatatctgaataaacatcgtcaccaatttcatctaatatactattgcaagaaaaatatgatcctcttggtagcataagccctgtaccaatcattaaagtaagaagtgaattagcacgctcacttaattggaatacaatattagagctaaatccatcgggaaaaacaatctgaccttcaaatttatgttcacttttactttcaccatactggtgagttaatctaatttcttcatacattgggcaactctcctatatcaaaattaatttaattcaattcccgggaattgatataagcaacgttgctcggttattatcataatccatatttttttattaatcaggagcatatccaaaagtcataatgaggggggagcggttagataaatttaattatttaacaaaaaaaagacaaatcttgtaacaagatttgtctcatacttaattttaatcagtatatttactgctattatataattctttttttatttttaaatacattaattcttttactagctcgcttattctatctgtgaatatattagtatttttaagtttataattataaatttcattagttactagtggttttccattaatattatctctattaaatatacttatttgtcgtttcatacttctaagttctttaagaaatggatgagtataagacgtatattgattatgattatgtatatctttttttaagagttgtaaaccaagatgatcgatagcttgatttagatgatttattccttcttgaatttctctgtctggaataaaagattgagtgctactaatactgttttctaaagaagagtgtgcaagatattcctttagataaagatttttagcatctaaaaattttttattatctgattgaaggcttttaagtaaaatttgatcaataaaaggtatcttgaaattatatttatcaataaatacttcttttgtatgaatagaagtatttgatgatgtatttattgaaacagtggcttcttcgattatttcatgttcatgagctatactagaataattaataaattcatcatataaggcattaaaatcattacttttaccactcaaaattaattctttcaatgattgatatctagacactacatcattatcacatgtaataattgaatcatcattacttctcaaactattaataaatttattatagttttctttttcatcttgatgctcaaatagcaccttctcaatagcgctacttaatttttgatataaaataacattttcataaaagttactttctttcactgcattaaaaaatgtaattagttttttttctagaatatcactttctaccgctaaacgtttcatagtttgaaaagaaaaatctgtatctaatactttttttagttttctgaattctatatcctttacttcttttattcctaatttaaaaaaatcttcgaattcttgtgcattactttttgacatagattcattaatagcatcaatataatctatattattaggagtagtaggtaagggatatttttttaatagttttataagactacttaatatttgatattccaaggagttaaaattgtaattgaactgattattttctgccttaccatgataattatccggttgatattttgaaatgtctataccaaatatcttgtaaagtagcttcatttggttggtcatagttttttcagataagccaactttttcacgaacatgtaattttttaaattccatatcatcacttttattacttaaataaaaataaccgacattggttccctcattttgatttatatttatataaagttttatatatataatagatacaagttgatgagctttctttttcgttttataatttttaaataacttttccaattcattaaatagttcattcttttcttcatcatttaaactagttttctttaaatctaataaaattaattctttaatattaagaacttcctcaatcttagtttgcatttcattaagttctttacttttgagttttatctttattttttcattatcaatacttaatttttcatattgaataataaaattattgtattttccaacttccctttgtaaccttcctaactcattagtggtaaatttcgaggtaagattaaattctgttcgttctaatttaatattataatcccttaaaatattatttatattggtgataatttgctcatcaattggtactacaaattgaaaacctctttcttccttgtctgaattagctgaatttgatattttagaattttgcttatttaatgtcctttcttttttacccatttagctttctccttaattaatctattttatatattcaattaaaaaactacttaatttaatactatgatttctcttttattaaatataatgtataaaattatattaaaaaataatatatgtaaatagtaccatatattgactatcaaaaaatgaatgttgaaaatagaaatgtcttgctgactaagataattcaacattttacttataggcgataaaacaaatgaaaggttctgttgcaaagttaaaaatcatgtaatatttatactgaaaaacgaaaaataattaatactaacaaaactctttactgttaaaacaatatttgcttttatagttttgtatagatgtgcatataattttaactttgcaacagaaccttttcttatatatccccttaatacacgctattttaaccgacaatttttccaaagtgttgcattttccaacgacgtaaaacttttaatggtaccgaacgtgggtataacttgttacattatcaaatgtaacattttaaatatgcttaatttgaggtatcgatttaatgtaattgctcacaaatcatcaacacactacccatactttaagcgatataaattaatgaaatagggggaaatgtcttggcaaagctattatacaaactaggaaaatttatagctaagaacaaatggctaagtgttataggatggcttgttatactaggtgtcattatcacgccattaatgataaactcaccgaagtttgacagtgacatcactatgaacggccttaagtcattagacacaaacgataaaattagtaaagaatttcatcaggacagtgagaaagcctcgatgaaaatagtcttccattctaataagaatgatggactcaataataaagatactaagaaagatattgaagatgctttagacaatatcagacaaaatgatgattatatccaaaatatctctaatccatatgacagtggacaagttaatgatgaaggcgatactgctatcgctaatgtaagttatgtagttccacaaactggattaaaagattcttctaaacatatcatcgacaaagaattaaaagatgtaactgacaaccacaatgtgcaaattgaaaaaactcaaggtggcgctatgaatgctgaacctggtggtacatcagaaattgtcggtattgtcgtagcattcgtaatcttacttattacctttggttcacttatcgcagctggtatgccaattattagtgcaatcatcggtttaggttcaagtgttggtatcatcgcattattaacatatatctttgatattccaaacttcactcttacactagctgtaatgataggtttagctgttggtattgactactcactctttattctatttagatttaaagaacttaagaaaaaaggtgtcgatactgtagaagctatcgcaacagcagtgggtacagcaggtagtgctgtaatattcgctggtcttacagttatgattgctgtttgtggtttatcacttgtaggaatcgacttcttagcggttatgggattcgcttcagcgattagtgtgttatttgcggtattagcagcattaacactattacctgccctaatcagtatcttccataaaagtattaaaattaaagataaaccatctaaaagtaaagaccctaaagatcatccttgggcaaaatttattgttggtaagccagttatcgctgttattgtaagtttaattattttaattttagctgctataccagtcagtggcatgcgtttaggtattccagatgatagtttaaaatcaactgactcatcagaatacaaagcctataaattaatctcagataattttggcgaaggttataacggacaaattgtcatgttagtaaatacaaaagatggtggaagtaaaagcactatcgaacgtgacttaaataatatgcgtagcgatttagaagacattgataatgttgatacagtttcaaaagcacaactaaccgacaacaacaattacgcattattcacaatcattcctgaaaaaggaccgaactcacagtcaacagaaaatctagtatatgatttacgtgattatcatagccaagcgcaagaaaaatatgactatggcactgaaatttcaggacaaagtgttattaacatcgatatgtcagaaaaactaaacaacgctattccagtatttgcaggcgttatcgttgtattagcattcttcttattaatgattgtattccgttcaatcttagttccattaaaagcagtactaggctttatcctttcattaatggctacactaggtttcacaacattagtcattcaacatggctttatgggtagcttatttggtattgaaaacacaggaccattacttgcattccttccagtaatcacaattggattgttattcggacttgccatcgactacgagctcttcttaatgacacgtgtacatgaagaatacagtaagactggcgacaatgatcattcaatccgtgtaggtatcaaagaaagtggacctgttatcgtagctgctgcacttattatgttcagtgtattcatcgcattcgtcttccaagatgacagtgcaattaagtcaatgggtatcgcattaggtttcggtgtgttattcgacgcattcgtcgtacgtatgacattaattccagcattgacgaaactctttggtaaagcttcatggtaccttcctaaatggttaggtgcagtattgccaaacgttgacgttgaaggtaaagctttagaagaagataaacatcacgacacatcttctgaaaaaggtcatgtcaacgataaaaataatgaatacgctagacaagacaaagataactatgtttatcaaaatgacaaacgtaaccacaatcgcaattataatgacgaagattataaccgttctgtgcatttagataatcatcatgaccagcatcatcgccaacatcattatgataatcaacgtgatgatatcgactatgaatcactttatactcaagatggcgaccatactcatcatgatgaacgtaattataatgatcgacactatcaagacaattacgatagtaacgatgattatcgtcataacaatcatgatcatcaaaatgataaccatgattatcatgattcaaatttcgataaaacaacaaacttatacaaagaattaactgatagcaatattgatcaagatgtattgttcaaagcattaatgttatacgctcgtgaaaacaacaaaggtgtttacgatagatataaccgatcatctcaacatcgtcatgatgacgagcttagagactaatattaaaaaggaggaaacacgttatgttaaaacgacgtagttcgaaattcttaggactactagctacactagccttagccatagtgctaagtgcttgtggtaatagtggtagcagtagtggttcatcagacgatagtcaaacatcacttggtaataaagaaatcgaaataccttatatcgcgagtgataattcaacaccacgttcactagttatagcagaagtattgaaaaaagcaggttatgatgtaacaactacaccagtaacagcaagtggcccgttatatgctgctgtatcagagaactctgattcattccatgaatcaggtatcttccctactactgataaaagttactatgataagttcaaaagtaaattaacaatttatgatgataaacatttaattgataacgcaaaagtaggtttagccgtgcctaagtacgtgcaagatgtcgactcaattagtgacttaaaaaacagtgacttcggaaaatctgtagattggacaattcaaggcacagacgcacgtaatggcgttatgcaagaaactaaagatgaacttgatagtgacaacttggataaatatagcttgaaagaaagttctgaccaagaccaattcaagaaaattcaatctgcttttaaacaacaagaacctatcgtcttcacagcaatggaacctagctggttctctaaagaattagacgttaaaatgttgaaagatccagacaacatttatggtaataataatcaacatattgacttagtatttaacaaagactttaaagaagcacatccagctgcatacacaattgcaacacgtatggcagatgattggagtaaatctgacgaagacaaattagctaaaaaaatctttgttgataacaaaaatccagaacaagtagctaaagactatgtagatgataatgataataaagtagatgaatggttagaaggtattgagactaactaattacaaagttaagaaagacaaataaagaatatgctcgtttggtgtagcatatttaaaactcataatgcaaatttacagtagcaaatcgagttgagaaggcgcttaagacaaactcttctcaatcgtagctattattgcgagggggtgaaactaaactcagtttcgctcccacttttttatatcgctcctatagtattaaacgtttcaaataacttatttactctttttttataaacaaatttaaacgtagtatcagttattatgtttggaaaaatcaactttattgtgataaattactcttattacgtcaggctatctgactagattaaataaataggagaatcagataatgccgtcagcaaatcaaaagcgcatgattaaacatattcatgaaacagtgtttatacttttacatgattatcattttgatgaaatcacggttcaaaaaatatgtgatattgcagaaatcaaccgcagtacgttctacagatacttccaagataaatatgaattactctacactttacctgactttattacacaacaaattatagctaaaggtgacacatcagcagacattacaacccttgaatcatttgaagactttatctattacattggtaataataaaaagatttttaagcatctattagtttcgtctcgacaggcagatgtatttagaagtttaacgaatgtgagtcgcgaaatgatgttaaataactcaactcgtaagcgtggccccttagcgcaaaagattagagaaagtaaacatcctgaaattgtagctgacttttacagtagtggtgtaatagaagtactacgacgttgggtagaaaatgactataactatacagttgaagaagtgtttgaaacattaaataatgtgcttgaaacatcattatattgttatgataaataaaagcaatctcacataaattaagagtgagattgcttttttgtcatttgcgttttttaacgtctactgtcttataaaccataaaaatactattagctatgattaataatgctagaatgaccattggccaaatacctatattaatcatattaaatatgattctgttgcaaagttgaatttatagtataattttaataaaaaggagtcttttgtatgaactatttcagatataaacaatttaacaaggatgttatcattgtagccgttggctactatctaagatatgcattgagttatcgtgatatatctgaaatattaagggaacgtggtgtaaacgttcatcattcaacggtctaccgttgagttcaagaatatgtcccgattttatatcaaatttggaagaaaaagcataaaaaagcttattacaaatggcgtattgatgagacgtacatcaaaataaaaagaaaatggaattatttatatcgtgccattgatgcagagagacatacattagatatttggttgcgtaagcaacaagataatcattcagcatatgtatttatcaaacgtctcattaaacaatttggtaaacctcaaaaggtaattacagatcaggcaccttcaacgaaggtcgcaatggctaaagtcattaaagcttttaaacttaaatctgactgtcattgtacattgaaatatctgaataatctcattgagcaagatcactgtcatattaaagtaagaaagataagatatcaaagtatcaatacggcaaagaatactttaaaaggtattgaatgtatttacgctctatataaaaagaaccgcaggtctcttcagatctacggattttcgccataccacgaaattaggcatatattagccagttaagggaacaacgacatgataaaaaggtaattagctatatttttctaactttgcaacagaaccaacattactatcctataatttacgaccatttagtaaagaattaaaatgtctttttagcactaataataactataataactgcaatataactacatattgaaagtaatgatgtatccataccatagtttccacctgtaattagtacattttttgtatctaatatatactgatatattccccaatgatcatcttgagttgtaatatttaataaaccatttatattccaaagcatatgtaatatagcagaggcccatatactattaaacgtccatgcagtcactgcatacattattccagcaattgagccacctataagtagtaataataaattttctccctttaactctccattaaatagatgaacgagagaaaataaaatcgagggtattataattccaaataaaattccatattgtttttcaaagtatctcattagtattcctcgaaataccatctcttctaatataggtgcagcaataccagtaattaaaaatgcgctaaagaacatctccataaatctgacgcttgttgaataatgaggtactatcaatttaccaggaataaataatatatatattaaatcaattactaatatcaaaattaatcctataagaaaacatgacttaaaaaattttactggtattattctatactctctcatattgcttttaagaacaatttcaatgaaccattttactgaaaaatatgaaagtactatatatgttaatgcatgtaaaatatattcaatactccaaatgctcgcaatatgccaaagcattgaaatattttgaacaacaacagacaatacaaaacataataaaataattaataatgtctttaataattttttgattttcataataaaacctcccaaaatattcgagagatacttacattagtttgaaaaaatttgtcctattgttccacaaattataattactataataataattacccaccatttttcagacataaatgcccaaaagttcatttcataatagtttttattatcttttttaatactattgtcacttcctgtaatgagatagtctgtactaacagaaaataattgtgacaattgcataagcatatttaagtctggctctgaaatacctttttcccatttagaaattgtttgtcttgaagtatttaatttttcagctagctcttcttgtgtataattatgttgcttgcgtaaaccctttatttgtttactaatcataatgtaagtcatctcctagcttcattttaaagtgatcgaggctatcaatctgtcctcaaattgtagcattctggaactatattgttgcaatttgattataagtatttacattttagtttacaaagctatagtttagcattattgtaggttaactacattttataggagatactatatacttaatcaatttcaaaataagttatacacaacttattttttagttttatttgtggtacgcttcgcctctcataattttaaatgctcgatacacttgttcgattaagacgacgcgcatcatttggtgtgggaaggtcattttgctgaatgagagtgcgtagttgctgcgatttaagacgtcttgatgtagtccgtttgatcctccaatgacgaagacgaagtcgctttgtccttgtgtcatgcgttgttgtagttctttagctaaaccttccgatgacaacattttaccttgtatttctaatgtaataacggtggcttgtggtttaattttggctaataatcgttgtccttctttttctttgacttgttcaatctctttatcactcatattttcgggtgctttttcatccggcacttcaatcatctcaattttagagtatgccccgagtcttttttcatattcagcaatcgcttgtttccagtatttttcttttaatttgccaacagctaaaatagtaatcttcattataggcctccatgttgataatagttattcgacttatccacaagttatcaacttgttaacagaattccctctaattataacagtaatgtatataaattctgtggaaaatttaagatttatctgcaaaaaatctcatttacacatcatttttgtggataagtctgtgtataatgtgagtatttctgtgtgtattattcacaatagtggataactttcttcagatttggggataacttcacgaccgtcttttatatttattcacagattctaagtaaatcactttatttatccactttttaatgaatattcatgtatagtccaaattattagatcatatctttaatttttccaaaaaaagagcttaataaaaacctcatattttcttaaggttttcattaagcttcatacttcttttcaattttataacgtgtaaatcggtgtcgcttgtgctttatctgtgtcacataataatacttctttttcagtatcgatatcacgttcatttaatacttgtccaacgctcattcgtgctaaatctttcatattattatcacgagataaatgtgaaagatagatacgtttcgtattacctgtaatcacatccgccatcgcatgtcctgcatcttcatttgacacatgtcccatatcacttaaaatacgctgtttcgtcttccaaggataacgacacatgcgtaacatatccacatcatgattactttcaaacataaatgcatcactaccttgaatcatacctttcattcggtctgacacatagccagtatctgtaatcatcgtaaatttcttatagttattatggaaaatgtaaaattgtggatcaatcgcatcatgagagacgttaaatgattctatatcaaaacctgcaatcgattttgtttcatatggattgaaaataaatttttggtccatcggaattttatcatcttttttctcaatcgctttccaagttttttcattcgcatacactggtaaaccatatcgacgtgcaatgacgccaagtcctttaatatggtcgctatgttcatgtgtcactaggatgccattcagattcttcatatctctatcaatctgactaaataaatcttccatctttttacccgtaagaccaacatctactaatagactgcctttctcactttctacataagtcgcgtttcctgtactaccgcttgctaatacgctcattcgaatcaagatggttcatcctttctcattatcttaaattttaattatttagagtgccttcagtctaattattttatatttactttttttctaaaaaaatatagtttcgaacttgtatctttgttcgaaactttccactctaaaagtacttttatattatactataccaacctgtaactagaaattccaattctctgtttatattaaatatgtaagagcaaaacaacgggcaaatttgaccgccattttgctctatttaaaatgattcactttttagttatcaatcacttttggattgactgaagtggcttcaacataatattttttcgtttcttctttacctttatgtttcactttgatttcccagtttgcttgtagtaattgaacgttggtttctcttactactgagtaatatcctaatcttgcatctaatacttcatcgccagcttttaagtaacgattgaaatacaagctttcaattgctttacgcggtgtaatgacttgcttcttaggattattgtcaccttttgcaggttcaattttactcattaatgtttgtttatacattgtcgctttaccatcgtctatattaaagcgaaggcgtgctttattgttattaagcaatgggtacccatcatatgtttgttcataggtaacagcatttgaattaatatcgccaagttgatagaccttaccattataaatatgattgataatgtaatcttttaaatcactaagattacgatcacttacatttacagtattatctacgtcaccacttactgtgaaaccagaatcacttgtttctaatgaagatttattttcagcgtatgatttaaagtttttagaagtagcagtaatcatttgcatcttcgtaccacttacatctttatttaatatatctgtcgatactttaatctcttcttgctggaagtttacttcattatcgctttcagtttcattaatttgcgatttagtcaccttattaatataaatcagaatgagaaagatattgactagaacaaacacgaaaataaacaatgttttggttagtttccagttcatttattcaagcctcccatcctgatatacataccattcaccatcatactcaacataccacgttggaataaattcactattgcgttgtacttcgatgtcatctttatctggcttatcatcttctttatagccaacgatcatattcgatattttttcaaaatcaatgttatgattgttcgcaagtgacgcacgcacagtttccaaactgtctaatgatgtcgttgcaccatctaaaggcacacttgaacgtagaagagcacgtttatagtcataaattcctttttctccccaagtcacgttaatttcatttaactgctggtcattaaatgtaggatgtccattgaggaataattgataggttaattctcctgacatattatccgtatcgaacagacggaaatcatcgttaaagaaaccaccatgattattaatatattcgaatgtacttgggatggaagtatccatatctttcgaaccagattcatcttccgataagtttttataatggtactttttactgtcatcattatagtttgcgacgccggtattattattatatgtggttgaaccactttttccgcttcgaataatgacagaatcatcaaataaaattgagttcatcgtttcgactgaaatcgtatcatataccatacgatatgagcgtaggtcttttggatgtttcggcgcaaaaatatgcgttgatttatcaatcgtcgtcttattcgtaatcacttccgaataggtttccatatctttttctaaatgatgaatggttttattaaatggcgttgccttagcgtctatcgtcactttcatgacttgttgatgatgtttactcagcgcatataattctaaatcacccttaggatttttatcaattaaaattcgattaaagctaaaatgtttaggaattttagctgagttattaagtacttgacctaaataggttgttagtggcatatcatacgtaaaatccaacacgacaaaatcatggtctaatatcggagtttgcaaattataccctttttgcattaattccactttactcacttcatgatctttgagtggatcaataacttgagcgagttgagatcttgatggtgtcaatccttttactttatctcctttaactgacacaacttgataaggtgaaatcactgtgtccatctttgcagctaaaggtttaccaatggttttagtattattttttttactatccgcgctgtctaaattatttaaatctggagtaaagttccatatcatatacgtaaggacaatactcatcatgactaaaagaaaaaggataactgatttaatatgttccttactgttcatcccaatcaccgtcgtctatcacttcacatggaagtgtaataaatatcgatgttccttgtccttcaacactgtttgcccagatacgaccattatgtgcttcgacaatttcttttgaaatggccagtccaagtcccgtaccacccattttacgtgtacgtgctttatctacacggtagaagcgatcaaagattttatccactttattaattggaataccaattccattatctttaatacgaatggtcattcgattataaagtgcattttgtttcacgtggaactcgacacgtttatctccacgagaatatttcatcgcattcgtaatgacgttatcaaatacttgtgtcatcttatctggatctatttctgtgaaaatcgtttcatttggaatttcacgtacaaacgttgtatctttcgctgccatttcatgtcgattaataattttattaataaacatattaaagtcgacaatttcttttgtaatttgttctgtctcattatccattttagataattgaagtaagtcatttactagtcgaatcatacgtaccgtttcttcacgtgtgactgaaaggaacgatggcgcaagattttcatctttccaagcgccttcttcaagtgcttcaatataactgttcattgatgttaatggcgtacgtaactcgtgtgatacattggcaacgaattcgcgacgttcacgttccacttgttgttgctctgtaacatcgtgtaatacggcgatataaccattaacaaatcccgtatcttgtacaatcgtgctaaagttgacacgtgcaataataccttcttcttcattcatatcaattaagatactatcattattctcttgaatttcttctaatgaaaaatcgccttctatttttaaaacatttagcatgtaataaccaatgaggtcttctttcgccatacctaacattttaatcgccatatcattcacaatacgaatacgaccacgtcgatccgtcgcaatgataccatcactcatatgtgtgatgacagaatcgagtcgacgtttttcactttctgtatttgcttgagcttcttgtacacgtttagaaagattattaaacgcaagcgcaagttcaccaatttcgtcattaccataaatcttaacacgctgtgtatagttccctttagacatttcaactgtttggttacgcatatctgtaatcggtcgcgtaatcgttcgcgcaataaagaaaccgagtatgaccgtgataaataaggaaatagccgtaccaataataaagatttggttaatattgttaagctggttatatacatcattaatatttgactctatgtaaatattaccgatcacatcattactattcttaactggtaagttgtaaatccaaatccgttctttaccatgaccatagtcttttaagacgttatgactatttgcttcgccaagagagattgctttttgaacagaattatcattcactttttgattaattaagctatgtgatgataacttcgctgtagccattataatttggtctttatcaataaagcggatttcttcaatctcttgtcggttagcgtattcattcagtagcgattgaacttccttttgtgcatttgaaggattgtctttataaatacgctcaatattgacttcgagttgtgtcgcatattgtttaatattcttcatgaaattatttgttaattctttttctaaactattagtgaaatacagaccaataatctgcattccaataataatcagtaagacataaacaataacgagttttgtgtgaagggattggagttgtttcagccacttcatcgtttgcaactcctaatcatgttgttggaggaagtatccaacgcctcgacgtgtcacaatatattctggatgagatggatcgtcttcaattttttctcttaaacgacgaatggttacatccactgtacgcacgtctccaaaataatcgtagccccaaaccgtttgtaataagtgttcacgtgtcataacttgacccatatgttttgaaagatagtggaataattcaaattcacgatgtgttaattcaatatcctcaccacgttttttaattgaataagcatcgggataaaccacgatatctttaatcgcaatttcattcgttgtaccttcagattcttgcgcaggttgagcatagtgacgtcttaagtttgctttcacacgtgcaattaattcacgtgtactaaatggtttcgtcacataatcatcagcacctaattcaaggcccaatactttatcaatttctgaatctttcgctgttaacataataattggcatgtcgtattttttacgtacttcgcgacatacttccatgccatcacgaccaggtaacataatgtctaacaatacgatgtctggctcttcttcataaattaaatcgacggcatcattaccatcataagcgcaatgcacttcatagccttctttttttaaattaaattctaaaatatccgcaattggcttttcatcatcaactacaacaacttttctagccatatctataaacctcatttctcaaattgtagttcaaaccttaatgtttattatattttgagtaaaacattaactgtattatatggcgctatcttacgtcttaacgcacgtttatctactatataatttaacattaatattcacttaattctattttcatatttaaaattatagaataacattaatttaaagtttaccacgctcgttttatattacaaataagttgagcgccttgaatattggacaaaagtcttaggaagactgaaacggtacaatgttacaaaatgatgatagtagatagtcgttgaaaattaagagtaatatataaaagatgtataaaaaaagagagaagtattaaaaatatattgcgacgtcatctatttgtaatacacacatcgctttactcatgataacgtctatatatttataaaaataaagaagcaatattaaaaaaacataaaaaaaatgcctacccttttggataagcaatacggtctcgacgggaatcgaacccgcgatctcctgcgtgacaggcaggcgtgttaaccgctacactacgagacctaaaatggtgactcctacgggactcgaacccgtgttaccgccgtgaaagggcggtgtcttaaccgcttgaccaaggagccgttcttaagcacaagatagattatagcatagcttttattttaaagacaagaacttttttacataattttaatatttttttataattccttaatttttagaaaaaaagagttgtattaaagatatattacatgacaatatactttttttctttacttttacattattaattcagatttaaatgatacgtttatcattatcatattttatatataaaaaacgttgctaaagtgagtcactttaacaacgttagatgtatacaattaaatgttttattattaacgggcttcgaaacgtaattctctcatccatcatatgctaatctctaaaatcaaaaaccgattttcgctcttagcacgttattgctctaggtttatacgcttttcttaccataatttttctaataggtttgtttgctcacggtcagggcctacagagaagattgaaatatgaacgccacataattcagaaatacgttctaagtatttacgtgcgttttcaggtaattcttctaatgtacgacaacctgtaatgtcttccgtccaaccaggtaattcttcgaagatgggtttacaacgacgtaattgatctaagtttgctggatattctgtgattgtttcaccatctaactcatatgctgtacagattttaactgtatctaaacctgttaaaacgtcaattgagttaatagataagtctgtaattccacttacacgacgagagtgacgtaatacaactgagtcgaaccaacctacacgacgaggacgtcctgttgtcgttccatattcacgacctacttctctaatatgatgaccatcttcatcgaataattcagtagggaatgggccatcacctacacgagatgtataggatttacatacaccaatcactttagatacgaaggttggacccacgccagttcctactgtcacgttacctgcaacaggattacttgacgttacgaaaggatatgtaccatggtcgatatctaacataacaccttgtgcaccttcaaataaaaccttttcatcagctacgaaagcgtcatccaaaattttagctgtatctgtaacgaattcttttaaacgttgaccagcggcatagtattcatcgaacatttcatcaaagtgtggacaagtttcattaaacatccctttgaaatatgcatttttaatctcaatattttcttttaaacgtctttcaaatgtatctttttctaatagatcagccatacgaataccaatacgttgtgctttatctacataagctggtccaataccttttttcgttgtaccgattttattatcgccgcgacgacgttcttcatattcatcttgtgctaagtgatacggtaagatgacttgcgcacggtttgaaatacgtagattatctgtagaaataccacgttcatttaaaccgtctaattcttttaataatgcaacaggatctacaaccactccattaccaatcactgctaatttatctttataaaaaatacctgatggtactaaatgtaatttgtatgtttctccaccaaactgaatggtatgacctgcgttattaccacctgaaaaacgcgcaatcacatctgcttgttctgctaagaaatctgtaattttacctttaccttcgtctccccattgtgtcccaactactacgattgatgacatgtgagcacctccaaagttttctcaattaaccactaagtattctatcaatacgtttcatataatgcaaataaaaatcgaacattaaaaatagcattcacatcagtcaaataaatacgtattttttattaaaaaacctttaaaattgctaatttaccagtatctcaagtcagttttacaaatgtttaatacacatacttcacttaactttactttttaaaaacaaaataaaaaccgtacatttatattaaaaataataataatgtacggtaaaaaatatttttatgacatgtctgcatgtgcataatcaatgtctgtaaatttattatattgtttcataaagtgtaacttcactgtgcctgtcgggccgttacgttgtttggcaataataatttcaatctcaccattatcgtcattggattgaggttcgaactgcgtactatcgtcatcttcttcaccatcgcctcgattataataatcatcacgatacaagaacgcaacaatatctgcgtcttgctcaattgatcctgattcacgaatatcactcatcattggtcgtttatcttgacgttgttctacgccacgagataactgactcagtgcgataacgggacattctaattcacgagcgatggcttttaacgtacgtgagatttcagagacttcttgttgtctattatctgaaaagcgtgagccactcccttgaataagttgtagatagtcaatgacaatcatatcaagaccatgttcttgtttaagacgacgacactttgatcgtaaatctgtaatacgaattcctggtgtatcatcaataaaaatctttgttctcgataatttacctactgcaatcgtaaatcgattccagtcttcttctgtcattgtccctgttcttaaacggttagaatctacatttcctgaactacaaatcatacgtgtcgcaagttgatcggcacccatttcaagtgagaaaatacctactgtatagttatcttcatgagtggctactttttgagcgatattaagtgcgaaggcagtcttacctacagaaggacgggctgctaaaataattaaatcatttctattaaagcccgcagtcatctggtctaaatcgcggtatccagtaggaatacccggcgtttgcccactattttgatcaagttcctctgcagtctcatatacttgacctaagacatctctaatatctttaaatccatcactttgacggtttgctgagagttcaagaatacgtttttcagcatcacttaaaatagcatctaattcaagctcattattatacccatcattcgcaatgctatcagctgtttgaattaatcgacgtttaagcgcaagattagcaactatatttctatagtattcaatattacgtgtcgtcggtacattattcgataattcagctaaatattgagggccaccagcctcacttaatgtaccttctttcgttaattgttccattaacgtgactacatcaatctcatgagcatcttcgtttaagttcatcattgctctaaagatatgttggtgtgcacctctataaaacgactcaggaagtaatacctcctgagtcgaacctattaattctggatctaaaataattgcacctaagacagactgttcagcttcattgttatggggcatttgtctttgatcatacatattatccatcaatcattacacccatctatcttaaaattttcgacatgctagtgcaacattatatctttctatgaattgcttttaaaagaatggactacctatttgtcctaaatctttttatttttctacagtgtgtacgcgaattgtaccttcaacttctttgtctaatttaacaggtacattagtataacctaacgcgtgaataccgtgtggtaaatccattttacgtttatcaattttaatatcgtgttgattttttaatgcgtcagcaatttgttttgtactaatagaaccaaacaatttaccgccttcaccagttttagcacttacttcaacttcgatatcttctaattttgcttttaatgctttagcatcatcgatttcttgttgtctatccgcttcagcacgtctattttgttgttctaattgttttaaattacctggtgttgcttcaacagcatatttattttttaataaaaagttatttgcgtaacctactggcacgtctttaacttcaccttttttacctttacctttaacatcttgtgtaaatattactttcatgtatcttcactcctactcatttgttcagtaattgcttgttgtaattgctcgattgcttcttctatagtgacaccttttatttgcgttgcagcatttgttaagtgacctccgccacctaaggcttccattgttaattgaacattaataccgcctaatgaacgtgctgaaataccaataagattatcttcacgtttcgctacaacgtaagaagcttcaatgccttctaaacttaacaattcatccgcagcttgtgcaactgttacaggatgatagattttatcattagaaccgtgagcaatcgcgacaccgtgatcttgaacttcaactgtacgtatcaattcagaacgattaatatacgtatcaacatcatctttaaggaattgttgcgttaagattgtatcggcaccatgcgcacgtaaataacttgccgcatcaaacgttcttgaacctgttcgtaatgtaaaattacgtgtatcaacaataatacctgcatacataattgtagattctaaacgtgataaacgttgttctgttggctgatattctaataactctgtgacaagttctgcagttgaacttgcataaggttccatataaacgagtaatggatttgaaataaagctttctccacgtctatgatgatcaatgactactttacgattcgctttatttaaaatattttcatctaataccatttcaggtttatgtgtgtctaccacaacaaccgttgtttttgacgtcatcatatcccaagcctcatcagatgtcacaaatcgttctttcaattcaggttttttatcaatttcttccatcacacgacttaatgttggatcgatatcttcttcattaagtaccacatatgcttctaaattattcattgacgcaaatcgagatactccaatagctgcgccaaccgcatctaagtcgggacgtttatgtcccataataatcactttgtcgccttcagttaagatatctttcaatgcgtgagagataacacgtgctctaacacgtgttcgtttttccatcgggtcagtcttacctccgtaaaagcggacattaccattcatgtttttaattgcaacttggtctcctccacgacctaaggctaaatcaagtcctgattgagataattcaccaagttcaattaaatcttcggtaccttcaccaacaccaatacttaatgtcaattgtgcacgatagcctacacttttttcacgtaactgacttagaatatcaaaattagaatcttctatttctgctaagattttttggtttaaatacgctacgaattgatctgaactataacgtttaaaataaatgttatattcagttgcccatcgactaataatacgtgtcaccattgagttgatttcagaacgttgtgtgtcattcatattttgtgtaatttcatcgtagttatctaaaaacaacgttgcaatgataggctttgattcttcatataattcatttgtatgtacttcttctgtaatatcgaagaaatataaacaacgttcttcttcagaataacgcacatgataatggtactgaccatgttcgatttctatttcttgtattctttcaagttgcttaagaatattcggaaaaacttcattgactggttctgagatgacattcgtttctagatgttcagacatatattggttgatccattcgatgtgatcgtcagcatcaatcacaactaaaccaattggcatgcgtttaattgctttattacttcctgctgaaatatgaccactcagattatccacataatgatccatttttgataatgcttgtttaatcaataccgcactaatcacgatcataatgattaaagcaatcgccgtaaacgttgcaattaaaggtttaaatataaaccctacaataacaattgcaattgccgtaagcaccatcaaaatgtaaggaataagcaatgcttttttagtggattgacggttcattcttccacctctattcactttttaaagtcattttttaatcattcgttttaagttaattcctaaatcaagtacgccaagtaatgatacgatatgcgtaaagggtgaaatcactgtccccacgaccattaataatatagataccgcatcaggtaatcgtttggcctttccaaagaaatgaatcaaactcaatccttggatatacattaataatgataacacaacttcgaaattcaatacgatactttggaatatacttggtttcatcgcaaacatcacacatactagcacaatcatgtaaatccataataatgtgcgattcatctgccaagcaaataaaggtctaaacataggtgttgctactttgaatttgcgtaaaattggaaatgtaatgatgatattaattaaaactaaaagaaagaccataataatgatgtaacttggaagttgaacagccatttgacgaaatccttcttctaagatgatcttataatctgattcaacgcctgaatttacaatcgcattgttcattgcgtcttttgctggtttaatcaatacttcggtatttggaatctttttgaacgcttgtaataacataaatgcaattaacgtcacaatacttatatacattgttgtaatatataagatgcgttctttagatgtacgttcttttaataattggccaattacaaaacttagtaataaaactagaatcatggcacttaatacaaaggtattccctaataaggtcgtgatgactacagtgagtaaagctccaattccaaatgtagcaattgatttatgccacatgataatccctggaatggtagcgaataaacatagaatcagaccaattattggcaatacatacgtaactaaagcaactgctacaagcacgatagttcctataattattgctttaggatgtacttttgaaaacacattcgccactcctatacttttttgactataacgtctattttaacctctatattcaaattaaacaaatgtgttaactgttctcttatctattattttcgtttgaatttcgaaacttttaaaaagtgatacaagttaggtgcccagtcattaaaattaagtaaaaaaccatcatggcctacgttgtctggaacaaaaaagtgacgatgatatttaaaacgttctcctactgctctaacttgatcatctggatataacaagtcatctgtaaagcccatagttagtacttttgtatttaaagattggaagacctcatccacatcatcgcgctgacgatcaagatgatgactatctaagacattcaacatcgttaagtaacacgataaatcgtaggattctttaaacttattgccttgataacgttgataattgactacttcatctggtgtgaaacgcgcgtcataactttttgaagaacgatatgttaagaatccaagttgtcttgcaatactaagtccctctttacctccaatatgaatcgcttcacgtgcaatttcattgaaagcacgactgtatgaagaggttttatctgtagctgctaagatgactgccttatctacttcgaattgatgattatataataattccatcacttgcatgccacctaaactgccaccaattaaaatatcgattttagtaaatccaagggcctttattcccaattcaattgccttaactatatctcttaatgttattgttttaggaaaatgagcatcgtttaatggggagcttgaaccaaaaggacttccaataacattaaaagtaagaaactgataatcatagattggcatataaccaccatcaatgatttcacgccaccatccaggatgttcatctgtaccataagttaaatgattaccagtcagagcatgacaaaccacaacaagcggttgtcccgaataacctacgtgctcataacgcaattttagattctcaattgtttcacctgattctgttgtaaaagcacctaaatgtaatgtatctactgtataatttgtcatgctatgcctccttagaataaaaaaatcgcttctactcttaattttaaaagtgtgaagcgataatactttagtacttatcattcgagtatctcgttggttgtagcaccgtacaatgatttgtcggttgctgaagcttcatagggccaattccctctacttctcaaaataagagtatctatatattgattgcattgtttaatttaaatttattttaatacaattgtctagttaacttcaatgcgcagtaaataaatgggttaaaagaaccatcgtatacctgcaatgaatataatacctacaataatagtgatggttagactacgcgtcacaattgcgataatgactgtaggaatggttgctacaatgaatggaatatttaattcaaagccctgcatgcctttatgttgaacgataaaactatcaataactaacgcagtgaataatgaaattggaataaacgacagccatttgatgactgtttctgacagttgaatacgtgaaatcattaaaaaaggtacgacacgtacaattaatgtcactaatccacataaaacgatgagtaaaagcatatgtccagttatcgtcatcgatccatcaccaccccaagtgttgcagcacaaattgatgtaacaagaatggccacataagagggcatcaaccaacttaaaatgaacatcattacaataacgaacgcaattaatacgatatatatacttattttggaacgtgtaatcgtttcaaattgagccatagccaagaaaataaacatagctgtaatcgcaaagtctaatcctaacatttcaggatgagagatgtatttcccaaagactgctcctaacacacaagcgattgcccaaaatgaataagcagtaatatttaatccatgtaaccatcggtcattaattgtttccccttttaagtgtggcgttatagcaaccccaaaggtctcgtcagtaagaagagaagacaaagctaaacgattccatataccataatctttataattaggtgataatgtcatagacaataaaaagaagcgggaattcacaattaacgttgttaacacgattgctgatataggtgtaccagtaataactaaagcacaaataataaattgtgctgcgcctgcataaaccaataaacataacagaagaatttctagaacactaaaatcctgagaagctgccacaatgccaaatgatagtcctataccgatgtatcctagtagtgttggaatacattctttgactccttgttgaaatgttacatgtgacgtcatgttagctccccctttatatatgtattttcaaattgactatatattttaattaaatttagtctaatataatctaatagacgcttcaatatctttagacgtccgtttgagtgaggttagagagaagggcgtttagaaatattgatacttcaatgttttaaaaatatcagaaattttcgatatttttaaatttacctttctcagggcagtcttatttaatataaaaataaataaagcgatagaggactatgtcactctatcactttatgagttgaattctatttaatgattagttgactggacgaatttctgttttgccgcccataaatggtacaagtgcttctggaattgtaattgaaccatcttcgttttggtagttttctacgatagctgcaaatgtacgacctactgcaagtccactaccatttaatgtgtgtactaattctggtttagaagaagcatcacgtttgaaacgaatgttagcacgacgagcttggaaatcagtacagtttgagcaagaactaatttctttgtagtcattgtaacttggtaaccatacttctaagtcatatgttttacttgcgctgaaaccaatatctccagtacataagatcacgcgacgatatggtaattttaattcttctaaaattgcttcggcattttgagtcatatcttctaatgcatcccaagaatcttcaggtttttcaaaacgtaccatttcaactttatcgaattgatgtaaacgaattaaacctcttgtatctctaccagctgatcccgcttcactacggaaacatgcagtttgaccagtgaatttttctggtaacacatccggttggataatttcatttctatagaagtttgttaatggcacttctgcagttggaattgtatataagccttctttttcaactttgaataaatcttcttcaaatttaggtaattggcctgtaccaaacattgtatctgcatttaccaattgaggtgtcatcatttctgtataaccatgttgtgttgtatgttttgttaacatatagttcattaatgcacgttctaataaagcaccatctttagttaaataaacgaagcgcgcacctgatacttttgcagcacgttcgaaatcagccatttttaattcttctactaaatcccagtgcgcttttggttcaaaatcaaattcacgaggcgtaccccatttttttaattcaacattttcagtgtcgtcagcaccttgtggtacgtcatctgcaattaagtttggaatacgaattaagatatcacgaattttgttatctacttcatttaattttgcatcattttctttaatttcatcgcctaattcacgcatttctttaatgacgtcatctgcatcttctttattacgttttttttcagcgatttgatcacttactttgttacgacgtgctttcatttcttctgttttaccaattaaatcacgacgttgattatctaattctaatacttcatcaacaacctttgaatcatctcctcgtaattcaattttgctcttaactttgtccgtttcgtctctgaattgcttgatgtctaacatataatattcatccttccaaaaaatttatattgagtgaccatagcgatttaaaataaaaaaagaccacgtccccatacaagggacgtggtctacgcgttgccaccctatttaacaatttaattaaataaactaaattgcactccactatcgataacggttaaaaccgattgttcaatataagtaggtagattcgcataaaaattaattacttgtttacactaaccacaagctctctgaaattaatacccttatgttacttagcctacgaacaatactttattaagttaattttaatatagcaaagtcatatataattttcaagcagttacctcaaccaaatataataaactacatacgttaaaattctgtcaattttagcatttataaatttatttaaaatagtgttgacgaaacgcttaagcaggtataatattttctattgtatttaaaatgcacatgatattttcgcttgtcttaataactcatcattttattgatttaatatatagaagttatgactttcgaatctaaatagggaggattcatcatatggaaacattaactaatgtgacaattcctaaacgtaatgacgaaacgcataaaggtgattatggaaaaattcttttaattggtggtagtgcaaatttaggcggagcaatcatgttagctgcccgtgcatgtctttttagtggaagtggtttaattactgtagccacacatcctactaatcatgcagccattcattcacgttgtcctgaagcaatggtaatagatattaatgatactaaaatgttaacaaaaatgattgagaatacagatagtattttaattggaccaggtcttggcgttgattttaaaggaaataatgcgattactttcttactacaaaatattcaaccccaccaaaacttaattgtagatggtgatgcaattacaatattttgtaaacttaaacctgatattcctacatgtcgtgttatctttacaccacatcaaaaagaatgggaacgtctaagtggtattcctattgaagaacaaacgtatgaaagaaatagagaagctgtggataaattaggtgctactgtagtactaaaaaaacacggtacagaaatcttctttaaagataaagaatacaaattaccaattggcacacctgcaatggctacaggtggtatgggtgatacattagctggtatgattacaagttttgtaggtcaatttgatagcttacaagatgccgttacgagcgcaacttatattcacagttatattggtgaaaaactttctgaaaaaatgtacgttgtgcccccttcaaaattaattaatcaaattccttatgtaatgaaagaattagaacgataaataataaaaataagacttccctatatgtgggaagtcttatttttatatttaattctgatctgaatcattctcaatatcttcatttacacgatccatgaaatcttgtcttacttcgatgcgttcatcatcttcatcatcttcatcagattcagtatgcaaagcgttaccaggtgtcgtatcatctatcacttgttcatttgcgctttctgtagtttgggcactcacattttctgtttgttgtgccgcttcagttgcagcttcatcttcagttttatcaatgactttcgcaacggttgatacggcttgattatcgcctaatttcattaatcgcacaccttgtgtggcacggccattttgagaaatatcttcaacttgtagacgaataataataccaccatctgttacaatcattaaatcttcttgaccgcttaccgttgtaatacatacaacattaccattacgttctgtaattttagctgtttttatacctttaccgccacgattagataaacgatattcacttacaggtgttcgtttaccataacctttttcagtaacgactagaacttcatcttcactttcagcataggctacgtctaaacctacgactacgtcattttctcttagagaaatacctctcacacctgaagctgtacgacctagtgggcgtaaactattttcagggaatcgaattaatgaggcatgtgctgtaccaagtaaaatatcttgtttaccatcagtaagacgaactgcgattaattcatcatcttctttaaagccaatcgcaattttaccattcttattaatatgagagaagttacttaatgcagaacgtttaacaataccttttttagtagcaaagactaagaaactgttctcatcttctaaatctcttacggcaatcatcgtactaatcacttcatcattttcaagctcaatcgcattaatgactggaatacctttagattgacgagataattcaggtacttcgtatcctttcaacttataaacacggcctttattcgtaaagaataaaacattatcatgtgtacttaatgttacaagttgactgacaaagtcttcttctaaggtattcataccttgtacacctcgtccacctctgttttgtgaacgatatgtagatacaggtaaacgtttaatatagttgttatgacttaaagtgatgacaatttgttcttcagggattaagtcttcatcttctaagtgatctaaaccacccaattgaatttcagtacgacgttcgtcaccgaaacgttctttaatttctgtaagctcatcacgaacaagttgaagtaatacatcttcatttgctaaaatctcttctaattctgcaatataacttaataattcattatactcattttcaattttatcgcgctccaacccagttaaacgacgtaaacgcatatctaaaatggcttgagcttgacgttcagacaatttaaaacgttcttgcaatgtttccatcgccactttatctgtgtcagactcacgaataatagaaataatttcatcaatatgatccagcgcaattcttaaaccttctaagatatgtgcacgatctttcgcttttttcaaattgtattctgtacgacgacgtacaactgttttttgatgttctaaatattcaacaagcgcttcttttaagttaattaatttaggtcgaccattcacaagggcaatcatatttacaccaaatgatgtttgtaatggtgtatgtttatataaattatttaaaataacatttgcattggcatctttacgtacatcaataacaactcttacccctgtacgtaaacttgtttcgtcacgaagatctgtgataccttcaattcttttctcacgcgctaattctgcaattttctcaatcattcttgctttattcacttgatatggaatttcagtcacaacaatacgctgacgaccaccgccacgttcttctattgatgcacgtgcacgcatttgaattgatccacgaccagtttcataggcacgtctaatgccacttttacctaaaattaagccagaagttggaaaatcaggaccttgaatatcttccatcaattctgagattgtgatatcaggattttgacttaaacgtaagactccgtcaatgacttctgttaaattgtgtggtggaatatttgtagccataccaaccgcaatacctgaagcaccattcactaaaaggttagggaaacgagaaggtaagacttcgggctctctttctgtaccatcatagttatctaagaaatcaatagtatctttattgatatcacgtaacagttctaatgtgattttggtcatttttgcttcggtataacgcattgccgcagcaccgtcaccatccattgaaccaaagttaccttgaccatcaacaagaggataacgatagctaaaggtttgtgccattcttaccatagcatcataaattgaagagtcgccgtgtggatgatatttccccataacgtccccaacaatacgtgctgattttttataaggtttgtctggagtcattccttgttcatttagaccatataaaatacgacgatgtacaggttttaaaccatcacgtacatctggtaatgcacgtgaaacgataacgctcatcgcatagtctaaaaatgattcgcgcatttcgttggttatatttctttcattaattcttgattgtggtagagaatcagccatcaagatatcctccttttatagtcagttcacattaagttaaattagaaatctaaattagcataaactgcattatcttcgataaattgtctacgattttcaacaacgtcacccattaacatttcaaatgtttgatccgcttctactgcatcttcaagttttacttgtaacatcatacgattttcaggattcattgttgtttcccataattgatcggcattcatttcacctaaacctttgtaacgagaaatttgccattttggagtaggatttagttcagcttttaatttatccaattcacgatcgttaaagacgtaatatttttgtttaccttgtgttagcttatacaatggtggttgagcgatgtatacatacccagcctcaattaatggacgcataaatctgtagaagaatgtaagtaataatgtacgaatatgcgcaccatctacatcagcatctgtcatgataacaatcttatgataacgggctttagaaatatcaaattcgccacctatgcctgtaccaaatgctgtaatcatttgacggatttcattgttatttaaaatacgatctaaacgtgctttttccacatttaatattttacctctcaacggtaaaatcgcttgtgtttttgagtcacgaccttcttttgtagaccccccggcagagtcaccctcaactaagaaaatttcactttcatcaggatttttacttgaacagtctgccagtttaccaggtaaacttgaaatttctaatgctgatttacgacgtgtcacttcacgcgcttttttagctgctacacgtgctcttgacgccatgattcctttttcaacaatgattcttgcaacatttggattctcatataaaaagcgttcaaagtgttctgaaaataatcgatcaacgatttgacgtacttcagagttacctaatttcgtcttcgtttgaccttcgaattgtggattaccatgttttatagagacaactgctgttaaaccttcacgtgtatcttcacctgaaagacgttctttatcatctttaataatcttactttgagtcccataactgtttaagacacgtgtaagtgcacgtttaaagccatcttcatgtgtaccaccttcatatgtgtggatattattcgcataggataataagtttgtagcataaccgctattgtattgtattgcaatttctacttcgatatcatcttttgactgatgaatataaataggttcgtcatgaataggttctttattttcgttcagtaattcaacgtaagatttaataccaccttcataatgatacgtgtcttcacgttgttcttcatcttcacgttcgtctcttagtgtaattgaaatacctttatttaagaatgctaattctctaatacgtttttgaagtgtttcataattataaactgttgtttctgaaaagatttcactatctgctttaaagcgaatcactgtacctgttttatccgtactacctatttctttaagatcaaattgaggcacgccttttttgtatgcttgatgataaattgtttcattacggtgtacatacacttctaaatcttgtgataacgcatttactacagatgaacctacaccatgtagtccaccagatactttgtatccgccaccaccgaatttacctccggcatgaagtacagtaagaataacttctactgcgggacgtcccattttttcttgaatatcgacaggaataccacgaccattgtcagtcactttaatccagttgtcattctcaatcactacttcaatttgattagcatatccagctagcgcttcgtcaatactgttatcaacgatttcccataccaaatgatgcaaacctctttctgaagttgagccaatatacataccagggcgtttacgtaccgcttcaagtccttctaatacctgtatttgtccagcaccataattatctgtgttgtttacatctgacaatgtattcaccatcactttctattacttaataatttcaccttgattaattcggtaaagtttcgcattattcatgatttcatgatcaataccgtctaccgatgtagttgttacgaaggtttgtactttatgttgaattgtactgagtaaatgcgtctgacgagaatcatcaagttcacttaagacatcgtctaataataaaatcggatattctccgacttcaatgttcattaattctatttctgctagtttaattgataaagcggttgttctttgttgaccttgagatccataggtttgagcatccatgtcattcacattaaatcctaagtcatctctatgtggaccgtataaacatactgctctatccatttcacgttgttgatattcattcaataacgtgatgacttcatctaataattcactcttatttttacttgtatcgctaagtttaatacttggtaaatattttagagataatgtttcacgttggttcgtaataccagcgtggataggctgtgctaaagcctctaattcttcaataaattgctcacgtcttaaagtgacattaagcgcatattgtgcaaattgttgatttaaaacctctagcatcgttttatctgttttttgaccaagttgtaactgcttaagataattatttttttgtttgagaatacgttgatattgagctaaatcgttgagatatactgcagaaatttgccctaattccatatctataaatcgtcttctaatttgaggagaacctttaacaatatttaagtcttcaggtgcaaaaagaaccacatttagatgtccaacatactgtgttagtcgactttgttccaagtggttcactttaacttgtttaccttttttagttatatacatcgttaatggcatggttccgtgtctataacttagctcaccctctattttagcatactcagagttaaaccgtataagttccttgtcattggaggttcggtgacttttagctaaagcaaggacgtaaattgattcaagtaaatttgtctttccctgtgcattttctccaataagaatattcacttcaggatgacaatttaacgtaaccgcttcatagttacgatagttttctaattggagtgttttaagcttcattgctcaccttgatgaataataataaatgaatcgatatctggaatatcagggaagtcgatacgatcttggtcagctagcttttttccacgacgtgtttcacgttcgccatttaataaaacatcgtaatcttgtaagaaccattttgcttgtccacctgattcgatgataccttctgttttaagaaattgacctaacgtaatctcgccttcaactattacttcttgaaccaaaataatcactccatttctttatatatcattactatattataccttttttaggaataaatttcatttaaaatgaagtgtgaaaccgtttacttttaaataagtttttgttattttaaattgttatgtaaaaaatagatgattttttgaaattatgacaaaaataatcagagacaatatctcaatttttaattttaaggcctatttcagcgaatataatgagttgtagataaaaaccacgttttactaaatttagcttcactatgaacctctgagatagtttaaaattactgttttaatcaataaaaaagtagaacagtaattcaataagaactctgttctactttaactttttaattaatctttaatgactagtatgttctgattggtaaaatgagttgagtgactgaatcatctgcttttggttttaagataaatggtttcatcgtaccaaagaattctacttcaacttcatcattatcaattgcttttaatgcgtccatcatatattttgagttgaatgaaattttcaaattgccaccttcaacatcagttgctgtaacttcttcttttactgtaccgatttctggtgatgtagatgataattctacaacctcatttccagtacttaatttaattacgttatttccgccttcacgtgcaagtaatgacgcacgatctatcgcatgatagaattctccgttatctaatcctaatttgatttcatagttttcagggaaaagacgtgttgtatcaggataatgaccttctaataaacgtgaaataaagtttacgttaccgaccttgaacaatacttgattagatgcaaagaagatatcgatgtcttcatcattatcactcataattttatttaattcagataatgctttacctggaataataacatttttattttccgattcatcttcaagctttaattttcttacagccaagcggtgtgaatccgtagcagtgcatattaattcattatcttgtataagccagttcacaccagttaaaactgggcgtgtttctgaggtggacactgcaaagtttgtttgcgcaataatgtttttaagtacttttacagataattgaattgcatcatcacgtgatacttgcggtaataatggatattgttcaggatctaaaccacttaaattaaattctgaatgtcctgatgtgataagggtttgaaactgttcatttgttgataatttaacatctttgcctggtaattttttaatgatgtcaacaaagaaacgaccaggaagaaccactgatccagtttcagtaatatcaacaatatcttctccatctacttgtttaggaatcgtgatttcaattgaaatttctgaatcagaaccagttaaaataacattattatctttagcatcaattttgatacctgttaaaattggtaaagttgttcttggtgagattgcctttaatgtatcattcaattgtgtgataaagtaatctctttttattgtaaattccattattaatttaaactccttccagtcgtttatacttaaattatataggttttaaaatcatagtaatagtagtagggcttgtggattagtggatatcttatgaaacgccttttatatcaaagttatacacatgtggataagttgttaatgatgtgtattactttttcacattatccacaatttaaccttttctagattcttgctatatttataaaattatttagaagcacagtcatctttgatattgaatgtcatattttagcaatgctgttatataacagattcatatttcctattactgtttacgtatttctttttctaaatcttcgacttcttgtttgaaaattggatccgccttaatatcattcgaaattttttcgtgtgcgtgaataactgtagtatgatcgcgtcctccaaattcctcaccaatttttggtaatgaaaaatcagttaattctctagatagatacattgcgatttgtcgtggatatgcaatcgactttgttcttttcttagcactaaaatcttcgatgcgtacattgtaataatgtccaactactttttgaatatcttgaatcgagatttttttagatttaggaacttgaataatatcttttaaagcttcagcagcaagttctgttgtaatcggtttaccttgtaattttgaataagcaagtaaacgcgttaaagctccttcaagttcacgaatatttgattgaatttgatttgcaatataattcaatgcttctgctggaatttctaagttctcttcttcgatttttttctgcaagatggccatacgtgtttcataatctggtggcgtgatatcaacaatgagaccccattcaaatcgagaacgtaagcgatcttcaagttttgctatttctttaggtggacgatcacttgaaataacaatttgttttttattttgatgtaattcattaaatgtgtggaaaaattcttcttgtgtttgttctttattttgaatgaattgaatatcatcaattaataatacatcgatatttctatatttttctctaaatgcttcaggttcattgttacgaatggatttaataaaatcatttgtaaacttttcgcttgaagtataaagcactttggcattcggtttattacttaatacgtgatgaccaatggcatgcattaaatgcgttttccctaatcctacgcctccatagataaataatggattataagcttgtgcaggtgcttcagctacagctaagcttgctgcatgtgggaagcggttgccaggaccaatcacaaatgtatcaaacgtattatgcgtattaaattgatcgatatcatcatggctatcatcaatggcagacgttttgtttacagtatttgattggttacgactcgtttcatcaagttcagcgagttgttcagcagtgtaaaattttggatcaacttcataaccaatgatgtctttcataattgtttgaattacatctttataatttgagtttaaccaatcagcataaaactcatgaataacaaagatgtaagcaacattgtcgcgaatttctttaagttcagtgtcttttaaaaacgtattaaacgttgttttcgaaatctctgactcagctacttctaatacctttttccaaatttcttgttccgacatatataaactccatctttctataaatttaagacttatacacagtttttataagcgtggataaaaataatcacagcatgttaataattatccacaagttaatcacattcggtggataactttatatatgctatgatttatacacagtaaaaacacgtatagaatttataaaaaaatcctataagataaatgattcagacgacttatccacataattatactttttaactgcaatagatgtcaaatggctgtgaatatgtttgtaaatttggtataaatctgtgaatatgctattgattatccacaaaaaattaaatactatatgtgaataagtggataaaaaatgataccataatttaatgtactataacaggtttgggaaataatttataaacgtgtattaaatatgtataaaattgagaaactactaaatcaatgaaatgtataaatattaaaaaataaaagtgatataactaaaagagcgtcttgaaattcattaattggtttcaaaagctgcttgctttataaatggtaatttgttatattgtagtagttgcttgaattatgactagataaaatcgaattaaatcaaaattatttgatattaacaattatcatttatctattaaaatagtcaggttcattagaagtagatttagtgaacgagatataatatgtagatggaggtgttttgcatggtaaaacgtacttatcaaccaaataaacgtaaacatagtaaagttcatggtttcagaaaacgtatgagcactaaaaatggccgtaaagttttagcgcgtcgtcgtcgtaaaggccgtaaagttttatcagcataagatcactgacttctcagtggtcttttttttcgttttaaacccacacattttaatagatgaatgtaacataaagaacaatgtaagcgagtgatttaagcgtggagaaagcttatcgtataaaaaggaatagtgagttccaaaaaatttataaaaagggaaaatctgtagccaatagacaatttgttgtgtatacattaaacaatgagtatgaacattttcgcttaggcattagcgtttctaagaaaatcggaaatgctgtaactcgaaatcgtattaagcgtgccattagagaaaactttaaagtgcataagcaagatatgatttcaaaagatattattgtaatagcgagacaacctgctaaaaatatgtcaactttagagattcaaggcagtttagaacatgtattgaaaatagcaaaggtatttaataagagaattaaataaaattagactaacggaagtctaatgtcagacaaaccgaagactaacgaatagattataaaacaatatattcgcaatttaattagaaacttattacaatattatattgaaattttacttaactagggaggcgagaatggataatggattttgatacaattacaagtatttcaactccaatgggagaaggtgcaattggtattgtacggttgtctggtccagaagcggttgaaataggcgataagttatataaaggaaagaaaaaattaaaagatgttccatcacacactattaattacggccatattatagatcctgagacagatgaagttgtagaagaagtgatgatttcagttttacgtgcaccaaaaacctttacacgtgaagatattattgaaattaattgtcatgggggtattttgacaattaatcgcatactagaacttaccatgacacatggcgctagaatggcggaacccggtgaatatactaagcgtgcgtttttaaatggccgaattgacttatctcaagcagaagcagtcatggacttcattcgttctaaaacggatagagcctctaaagttgcaatgaatcaaattgaaggtcggttgagtgatttaattaaacgacaacgtcaatcgatattggaaattcttgcccaagttgaagtgaacattgattatccagaatatgatgatgttgaagatgcaacaacggaatttttacttgcgcagtctaaaaaaattaaaaatgaaattgatcaattattagaaacgggaactcaaggtaagattatgagagaaggattatctacagtgattgtcggtaaaccgaatgtaggtaaatcttcaatgctaaataatcttattcaagataataaagccattgtcactgaagtagctggaacaactcgagatgtattagaagaatacgttaatgtacgtggtgtcccattaagacttgttgatacagcaggtattcgtgatactgaagatattgtagaaaaaataggcgtagagcgctcacgtaaagcattaagtgaagcggatttaattctttttgtattaaataataacgagcctttaactgaagaagatcgtacattatatgaagtcataaaaaatgaagatgctattgttatcgttaataaaacagatttagaacgtcgattagatattgaagaagttaaaactatgataggggacacatcacttattcaaacatcaatgttaaaacaagaaggtatcgacgaattagaattacaaatcagagatttattctttggtggagaagtacaaaatcaagatatgacttatgtttcaaactctagacatatctcacttttaaaacaagcaagacaaacaattcaagatgccattgatgcagctgaagctggtattcctatggatatggttcaaattgatttaactcgtacatgggaaatattaggagaaattattggagaatcagcaagtgatgaattaattaatcagctatttagtcaattctgtttaggtaaataataaaaattaagacggtcagtagtctaaaatgaataataataattaaggaaaaaatagggaggtcaattcaatggttcaagaatatgacgtaattgttattggtgccggtcacgctggaattgaagcgggattagcttcagcaagacgtggtgctaaaacgttaatgttaaccattaacttagataatatcgcctttatgccatgtaacccatcagtcggtggcccagcaaaaggaatagtagtacgtgaaatcgacgcattaggtggccaaatggctaaagccattgataaaacacacattcaaatgcgtatgcttaatactggtaaaggtccagcagttcgtgcattacgtgctcaagctgataaagtgctttatcaacaagaaatgaaacgtgtcattgaagatgaagataacttagatatcatgcaaggcatggtagacgaattattgattgaaaatgatgaagttaaaggtgtacgtacgaatataggtacagagtatcatgcgaaagctgtagtcatcacgacaggtacatttttacgtggagaaatcattttaggtaatatgaaatattcaagtggtccaaaccatcaacttccatctatttcattagctgataatttaagagaacttggatttgaagttgtgcgttttaaaacaggtacaccgccacgtgtgaattctaaaaccatcgactattctaaaactgagattcaacctggcgatgacgttggtcgtgcgtttagttttgaaactaccgaatacattttagaccaactcccttgttggctcacgtatacaaatgatcgtacacataaagtcattgatgataatttacatttatcagctatgtactcaggtatgattaaaggtacaggcccacgttattgtccatctattgaagataaatttgtacgtttcaatgacaaaccacgtcatcaacttttcttagaaccagaaggacgtaatacgaatgaagtttatgtgcaaggcttatcaaccagtcttcctgaacatgttcaacgccaaatgttagctactattccgggtcttgaaaaagcagatatgatgcgtgcaggttacgcgattgaatatgatgcgattgtgccaacacaattatggccaacattagaaactaaaatgattaaaaacttatacactgcagggcaaattaatggtacgtctggttatgaagaagcagcaggtcaaggcattatggcaggtattaacgctgcaggtaaagtattaggtacaggcgaaaaaattctaagtcgttcagatgcttatattggtgtcttaattgatgatttagtaacaaaaggaacgaatgagccttatcgtttattgacttctcgtgctgaatatcgcttattattacgtcatgataatgccgacttacgtttaactgatattggttatgacttaggcatgatttctgaagaacgttatgcacgttttaatgataaacgtcaacaaattcaagatgaaattgaccgtttatcaaatatccgtattaaaccaaatgaacatacgcaatctgtgattgaagctcatggtggttcacgcttaaaagatggtatcttagccattgatttattgcgtcgtcctgaaatgacgtatgatacaattttagagatattagaagaaacacatcagttaccagaagcggtagaagaacaagttgaaattcaaacgaaatatgaaggttacatcaataaatcattacaacaagttgaaaaagttaaacgtatggaagaaaagaaaattccagaagacttagattatagtaaagtggatagtttagccactgaagcacgagaaaaattagcagaggttaaaccattaaatattgcgcaagcatcacgtatttcaggtgttaatcctgcagatatttctatcttacttgtatatttagaacaaggtaaattacaaagggtgaaaaattaatgagtggcatcgaatggttaacaaaagcgttaagtgagcaagggattgaattaacagaacaacaacaacaacaatttcaaacctattatcgtttgcttgttgaatggaatgaaaaaatgaatttaacaagtattactgatgagcatgaagtttacttgaaacatttctatgattctattacagctggattttactatgattttaatcaaccactaacactttgtgatgtaggggctggtgctggatttccaagtattcctttaaaaattgtttttccagaattgaaagtaaccattgtcgattcattaaataaacgtattcagtttttaaatcatttagcagttgaacttggattaacacaagtaagttttgttcatgatcgagcagaaacatttggtaaaggtgtcaatagagaaacatatgatgtggtaacagcacgtgcagtggcaagacttactgttctaagtgagttatgcttgccgttagttaaaaaaggcgggcagtttattgcattaaagtctgcaaaaggtgaagaagaattagcagaagcacaatttggtataagcatcttaggtggagcgtttagtgattcttacacatttgatttaccagaagatgcaggtgaacgacaaatgattatagttgataagcgccgtcaaacacctaaaaaatatcctcgaaaacctggtacacctaataaaactcctttattagaaaattaatcaatttttcggttactcatgttaaaattgattttaagaggagtgaatggacaatgaaaaaacctttttctaaactatttggtttaaaaaataaagaagacatcgttgattatattgaagaaaatcgtcattcaagtgtggaatccattcaaatagagcgtatcgtacctaaccgttatcaaccgcgccaagtgtttgattcaagtaaaattacagaacttgctgagtcgatagaagaacatgggttattacaacccattgtcgttcgacctatagaagagaatatgtatgaaattattgcaggtgaacgacgatttagagcattacaatccttgcatcaatctaaagcagacgtcattattcgtcatatgaatgatgaagaaactgctatagtgacccttattgagaatatccaacgtgaaaatttatctgcaatagaagaagccgaagcgtataaaaagttacttgaaattggacaaaccactcaaagtgagttagcgcaaagtcttggaaaaagccaaagttttatagctaataaattacgcttacttaaattagcaccaaaagtaattgtacgattacgtgaaggtaaaattacagaacgccatgcacgcgcagtattatccttaaaagaagcggatcaagaacaattgattgaacaagttattgctcagaaattgaatgtcaaacagacagaagctcgtgtgaaacaaaaattaggccctgaaaaagtaaaagcaaaaacattccaattttctaaagatttgacacaagcacgtgatgaagttggtaagagtattcaagccattgaagactcgggtattcatgttgagcatcgtgataaagatcacgaggattattatgaaattaaaataaaactatataaacgttaatgactaaaagaacaggtagaatgaatgttgcattcagtatcctgttctttttttgtcacctattttataataatggattctttatttcatatttacatagtttaaaaatagaattacaatattattaaacgaaacgtatcgtttaataattaaggtaagaagggtttcatgtgttcggaatatcaatttcaagtgcgatacttcattttgtgattggaggtatcgctgttgcttttgcatcgattatggctgagaaagtaggaggaaaaatgggtggcattattgcgactatgccggcagtctatctagcagctattattgctttagccatagatcatcgaggagaacagctgattcaaatgtcgatacatcttagttcaggagctataataggtattatttcttgcatcattacagtatttattacgtcgatttatataaataaacgagattataaaaaaggtacagcgtttgcatttatttgttggttagtcatttcaattgctatttttgcagtacgacacatttcttaatatttggaggattttttaatgaaattaacttttatcaaatttctcgtgggtggtttagctgttatgttaagttatattatttcagttattttaccttggaaggaattaggtggcgtttttgcaacattacctgcagtatttcttgtttctttatttattactggtatgcaacatggagatgtcgttgccaaacatgttagtagaggtgcagtttttggtatgacaggtgtattatgtagtatcttagcaacatgggcaatgttatattctacacatgagtggttacttagtattttggttggttttgttgtatggtttattagtgcagtaattatctttgaaattgtagaatttatttcacgtttaagaaggagaaaagatggctggaagaccgaaagatccaacaatcaatgaaaaaatatttaaagaaattgatcagttattagaaactacttattttagagatatgacaatagatcaaatttctgaaaatacaggtgtttctaaagcgacgatttatagacgttggaaagataaatcatctattattgtcgatatgtttgtcagtcgaatccacgtttttgaaaatgattataaaacgatgtacgatgaattgtatcattttctaataagagttatgaatatttatcaaactcatttaggtcgtgctgtgattgaaatattaattagttatcaacaatctgaagcacgtgacatatttatgaaaggttattttgatagcaatcgtaaaatattgaagaccattatttctaaatatattgacgaagcggaccaagatttatttattgatttaattttttcaccgatttatttcaatatattgattaaacctaacgtccttaatgaagcttatattaaaaaattattaaaagtaattttagatgcatataatgttgaatagtaaaaatattgaaactataagaaattagagtatcattcttattcttatataacccgtagatgattttaatctatgggttttttattaataatcagtattatacgatttcgctttcctaggggatagtttcagtttatgtcaactcaaagtcttttcatgtttatttatgattaaggtctcaatctttaatttgtcctacccctttaggagtttcattaccaatactttgcttatatttgttctaaagatcttaaaatattgcgatatactaaaatgtaaaacattttttacactaaaactaagataatgtaaaagaaaattgatagctttttattagaaaaaacgcttttataaatatagtattatgattttaaaaattaaataaaaatagtttaatttataacgaggtgaatgaatggatatcggtcaacaaataagaaaatatcgagaaagagatgaatattctcaagaatacttagcggaaaaattatatgtttctagacagacaatatcaaattgggaaaatgaaaagagttatccagatattcataatttactagtaatgtgtgagttgtttgatatctcactagatgatttagttagaggagatttaaattcaaataaacaagaatctataaaaagaaaaatgaacatttggtcgttagttatgattattggatttactttgtcttctatacttataggtcctctcttatattattttaattcatggggatttataataattgctattctttttttaattagcttttatagtggtactcaaatagataaaattaaatataaatataatttagataactacgatagaatagtagcttttatgaatggtaaagatccaaacgaagtaaaatctagtgaaaaaaggaatatatttactagtatattatcttttatttttatagtgggtttatttttatgtatgtgttatttgagtatatatttaacagagatatttttgaaatattaatgaaaaagaagctcaattcattttgagcttctttttttaattctaatgtttgttttcttcgtatcttttcaaaatatagccaccgccaagtaagcctaccggcacaccaataaatggctttgtaatactactagcaactaatactatcagagctaacatgataccattaaaccaatttacttttaaacttaataagtcgtaatatgcgtgttgaatcatttctttaatagtcattttaacatgtcctttcaatctattatttaaatggcgtctttaatgatgcgttctgaatgaatgaacgaaataactgcaaatatcagatatacaagtgaatagataaccatgacaatgaagataggtgtcaatgtataattacctattaacatcataaatgcgtttgctgcaaaaaaggcatggagtaaagaaaccactaatggtaaaccgaaattgaatataatctttaaagctagtccttttatcatatctgtattcgtaaaaccaatacgtcgcagaatacgataattatttatttcatcttcagtttcatccatttgtttaatataaataatgcaaccagctgccactaaaaatgcaagacctaagaaagaagtgacaaatataagaatgccattactttcatcaattgcttttttgttttcactttttaaaactacattttgttttccttttttagctaatgtttcagcttttgaaagatcgctatgatgcttaatattaaaaccataatgatgtgtaagttgattttttgtttttaaagcattatagttatctgcgctgattttaagtactggtccacccaatgaagcatccattggaatgatttcatttaaatcttttttatctacataaaatgtctttacttgttgcccttttagttttaaatctttatggatttgaacattaaacatcattgaaagtggaccttgtaaatttgtaattgtagcgtgattacctttgatatgaggatcagccataatcgatatactttcattttgcattgcgttacccgttttacttttaatgacatcattttcaataatatgggtattggcattttcatacgttttttttgtatatggtataccgtgttggttaagttgatgttcaaattgttgggccatctttactttagtaaagttaatatcttgaggtgacgatgattgaatattaaagtcagcatttgctttactaattgctccgaaacacaagattgttactgtaactgctgaaatgactgtaataatagttaaagacatcgcatttttcttcattctatacataatcgaagatgtaaagacgacatcagtgatagagacacgaccatgttttgatttttttaaagatttaaaaataattgaaactgaacttctgaaaaacaaatatgcgcctgctatagttaagaataaaataataaacggcgttaataaggccattgttaattcttgaaatttaccaaacatttctgtagacatataataacctaacatcatcattatgagtccaagaataccagcaatacattctggtgtggtgattttcgcttttactgcctctgttttcatactgtctttcatcatagaaagtatggttcttcgttttaaaaagatagcatcttctaacataattagaataaacgctaacattagcatgatcattgtttgaattaaagcagttacttcaaatcctatagacgcatgaatgtgtaaatgcatcagttttattaatattgaaagcaataattttgaacctaaaataccaacgatgacgccaataatgcctgtactaataaataaagtgatttgttcgatagcaagcattctaagaatgttaccacgtgttagtccaatgagttcgaataatgcaaattcacgtgtacgacgtttaataaatagatggttcgcatacattaagaaaatgataatcgtaatgaataaaaaaactgaaccaacttttgcaccttgattgattatttttgatgaaccattatttaagctatgtgtgtattgtaatgtgacaaaactaaaatataagatgatacttaagattaatgaaaaaagatataatacataatgtttgatattactttttaaattctttaatgtaatttgattaaacgtcatttgccacaccacctagggctgattgtaattgaatgatttcattataaaatttagattttgttttactttgttgaagaatttctgaatgaatatcgccatcttttaacataatgacgcgttgtgcaaaacttgctgctgaaggatcatgggtaaccataataatcgtactattaaattgtttgttcatatcttctaagcgatgaagtaaatcttgtgcactttttgaatcaagtgcacctgttggttcgtctgcaaaaatgatggatggttgatgtacaaaagcacgtgcagcagctgtacgttgttgttgacctccagaaatttcactaggatatttatcacttaaatcataaataccaagtgcctctgtgacgtcttgatagtttttttccatttcatcttttttcattttttggacagataatggcaacataatattttctttaactgttaatgtaggtaaaacgctataatcttggaaaataaaaccaagttctttcttacgaaattgtgctaattttttgttagataactggtttatctcattgccactgatttctacagtaccgcctgaaatgctatcaatcgaactgataacattaaggagggttgtcttacctgaaccagaaggtcccataattgcaacgaattctcctttatcgactgaaaagttaatatcgtgtagtgctttaaatttttgtttcgttccataaatttttgatacatgattaacgtttaaaataggcatgattatcatactccttgtaagttttataatttttctttcgctttagttggaatgtctgattgttttacttctttatatgatgtaatggtgtgagatttttcgcttacaactaagtaatgatgttgttttaattttttagacgctgtataatcaatgtttttagctttaccatctttggtgtaacctgtttgattgtaatggtagatatagaagtctttttccttatcaacgacttccacttttgatggtttttgagtcttaacataatactcatgcgttggtgctaagggatttaatttattccaatcattgatagaacgattgttaggatgttggtctgaatatgcgtttaatccaaataaaccacctataatgactacaataatgacaagaatagttaatatgattcttaataataatttcaatctcatcactccttatctctattacacttcttattttaaaagggtgaatgaagcggtgcctttatctaaccttacaaagtaagaggtgtatcttacgaatgtgaaagatttaaataaaaatcagtcgtaagaagaatgaaacgtgtttgaaaagtatgtatgatagagtagaagtaatcgagaataagaaaagatgataggcgggatgaaatgtgaaacgagaaatcatggagtgggttatatccattgtagtggggctactggttgttattgtagtaacaaagtttattggcgaatcttatacagtatctggatcttcaatgtatccaacgtttcaagatcgcaataaagtgattgtaagtaaaatttctaaatctatgaatcacattgataatggtgatgtcgttgtatttcatgaagattcaaaacgtgattttattaaacgtgtgattggcacaccaggggatacagtagaatataagggagaccaattatatgtaaataataaaaaagtgtctgaaccgtatttagattacaataagaaacataaacaaggtcaatatttaacaggctcatttaaatcaagtcaaattaaaggttcaaatggtgaaatgaaacttcctaaagataaatatttagttttaggagataatagacaaaatagtatagatagccgatttgatgttgtaggtctagtagataaaaaacaacttgtaggtaaagtcgtttggagatattggccatttaatgaatggaaaactaacttcaatccaggaacattttaaaaataaagtcacaacgaacatttttaattcgttgtgaccttttattttatagtagagtttttatcctatacaaactacaagagtaaatagaatttattttgaatttgtcgtccccaaaaagagaactaagcttgaaaaaagcttgcgacaaatgcatttttcaattcaatcatcgactactaatatatataaaaccggagacatttaatgatgtctccggttctgtcctatttcattttagattgttggtttgtgttatgtttaatatagtcctttttacgttgatgatcaggttgtaaggttaaacctaagagttttctttcttgatttgcatctttgaaaaatgaaatcatcattaaaataacaacaaaactaaatggtaatgctgaaataatagcagctgattgcagagcatctagacctgtcgatccaccagatagtaaaagtacgtaggcaatcgctgataacatgacgccccaaacaatcttaacaaaaccggatggatttaaacgaccaaatgatgtttgcatacctaatacaaatgtagctgagtctgcggatgtaataaagaatgagcctactaagataatagcgataaacgataaaattgcacccatagacatctcattgaaaataccaaataattgtgtttcaggtggcatactaaagatatgtttagattgcttaccaatttcaataccagtaataccgaaggctgtaaaccatagcatactaataattgtaggaacgcctaatactgcgataacgaattcacgaatcgaacgaccttttgaaatacgggcaatgaagatacctacaaatggtgaccaactcatccaccagccccaataataaatcgtccatgactgtaaccattcatgtttttgtgagttaagtggagcaacatcaaagctattaaaaataagtgtattcaaatattcaccaattgaggatgtaaacatattcataattaaaattgtaggacctacaattagaataataataagtaacatcgcagctaaaagcatatttaaattacttaaatactgaatacctttgcttaaaccactccaagcactaattaagaataaaactgtaacaataagaataataatgccttgaataagtttattgtttggcactccaaataaataatttaaaccaccgttaatttgcatggcgccaacaccaagtgacactgcaaccccaataatagtagcaaaaacggctaaaacatctacaacagtacctaatggaccttctactttatttccgaaaataggacgtaatgtacgagaaatgagtcctaagtcattttttctaaactgtgtatatgcaagagctaatgcaacaataccgtaaactgcccaaggatgtagtccataatgtaagaaacttgaacgcatggcttcagctagagcagcttctgtttctttactcgctgttggtggcgatagataatgtgaaatgggctcagaagatccatagaatacaagtccaatacccatacctgcactaaatagcattgttaaccatgaaatggtattaaattctggtttatcatcaggttttcctaacttaagctttccaattggatgaaaaataagtgtgatacaaaatatcagaataatgctaataagtagcatatagtaccaaccaaacgtttctgtaataaaacttccgattgctccagaaattgaaccaaattgattagggaagatggctccaataattaccagtaaccctacaataactgaagcaaaaataaacacatttgaaaactgtttagatttgttttccatgtatttaactcctttcaaatttaataaaacagatgtataaaagcttaacatatatcgttaaaagaataatgaataagtctgaaattttacaaatatttaataagtttatgtttttaatgtatgtaattatgttattatacttataatttatcgaatattttgaaaatataggaggttttaattatgtttggatatcaaattaatgaccacttaaaattaaaaatattagaagaacgagaagcggaacaattatttaaattagtagataataatcgtaattacttagcaaaatttctaccattcgttgactatacaaagaaggttgaagatagcaaaacatttattcagtcggccttacaacaatttgcgcgtggagatggattccattgtggcatttggtatgaccaaaaacttgtaggagtcattggcttacattatttagacttggttaacaaacgcacgtcgattggttattatttggccgaagatgctcagaaaaaaggaattatgacgctatgtactaaagcacttattcaatacgtatatgaagaatatgatattcatcgtattgaaatacgaatgtctactaaaaataagaaaagccgagctataccaataagacttggattcacacaagaagggatattgagaagtgaagaacgtgtacaagggaaattctcaaatagttatgtgtatagtttgttgagagaagaatatgatgattaattctattgtaaatacacattcaaatttatcttcaagacgattttataattattttttaagtaatcaataaacgtatgatatccacttatagattcattccgaacataatagagaatagaatcatctctttctattttaagcttattgtttagtaaacctatatataataaattaaaaaaaccactttcaatttacgctccagaataaattgaaagtggttaaaatttttatgttagattaagagtaatacaagcataggataacacaataaaacctattgtaaagatagagtcaattataggttataaattataatattacaatatttaagttttaaagtgataatttaatgaagttttagctaatatgtggacaattatatttaatagattaataatggaagtgtagagagaaatcaattttttaagcaacttaatctttcttttgattcttatttttcgtattgtaatggtaaatacgctaatatgtattttctatatcatatatttgtgagcgtaatttactgaagagttattaaatgatgcagtataaatatttattatggagggaaagctctatggcaaaaattatttatcaatctccaggaagatatgtacaaggaaaaggagttatcgaatctatcgcagatgaaacacaacgtttaggttcacatgcattaataatctcagatgaagttgtttggaatataactaaagatcaaattgatcaaagtttttcaaataattcagaagttaattatgattacgaaacatttaaaggcgaatcttcagaaaatgaaattaatcgtatcgttgatgaagctaagacaaaaggcatagatgtagtcattggtttaggtggtggaaaggcacttgatacaggtaaagcagtagccaatgctttaaatgcaagtgttatcgatttcgcttctactgcatcaatggatgcacctacggcagccgtatctgttatttatgatgataatggtgtatttagtggttatgaattttatcctaagaatcctgatacagtaatggtggattcacaaatcgttgcgcaagcgcctgtacgtttatttgcttcagggatgagtgatggattagctactttagttgaggtagaatctacgttacgtagacaaggaaaaaatatgtttagtggaaaaccatcattagctagcttagcgattgcacagaaatgtgaagaagtgatttttgaatatggacatagtgcatatgaagcaattaaaaatcatattgtatctccacaagttgaagcagtgattgaagctaacacattactttcaggtttaggatttgaaaatggaggacttgcagctgctcatgcaattcataatggttttacagcacttgaaggcgatattcatcatttaacgcatggtgaaaaagtggcctatggtattttagtccaattagtattggaaaatgcgccaacagaaaaatttgtaaaatatcaacaatttttaagtagtattcatatgccaacgactttagaagaactccacattgccgataaaagttatgaagatttggttcgcgtaggtgagcgtgctttagaaccaaatgatacttttgcaaatttaagtgataagttaaatgcagatgacattgcagacgctattttaacagtaagtgaattatctaaaggtacgtttaattccaaaggttaattttcgtaaataagataactaagaatagataagtaattagaaggataaagatagaacttatgtctttatccttttttgaaagagtatctttatatttactaatatgaaaattccaagtttaaataaagaaaatgatgttgatatttaatcttagataaactcactttaaatatgccaaaaggagtcgctttttgatgaaaaaattaattaaagaaaaaaataatattttaacagacatgttagagggtatcgctttaacgaatgataatattgaaattatttcagaaacagttgttgttaaaaaaaataaaaaaaattcaggagttgccttggtatcaggcggtggaagtggtcatgaaccagcacatgcgggctatgtagataatggtatgcttgatgcggcagtatgtggtgaagtttttacatctccgactccagataaaattttagatgctattaaagaagtcgatacaggcgacggtgtattattaatcgttaaaaattatgctggagacgttatgaactttgagatggctcaagaaatggcacaaatggaagatattaaagttgaacgtgtcattgtgaatgatgatattgctgtttcagatgtagaaaaacgtcgtggcgtggctggtacggtattcgttcataaatatgcaggttatttagcggaccaaggcctatctttagaagatattaaaaacaaaattgaatcgtttattcctaaaattaaaagtattgggatggcgcttacttcaccaatggtgccaacaactgggaaatatagtttcgatattgatgataatgaaatggaaattggtatcggaattcatggtgagaaagggttacatcgtgaagccatccaacctgttgatgtcattatcaaacgtttattagatgaattactaaaagaagtgaaagatcaatcattaattgttatggtaaatggtatgggaggcacgcctttatctgaattaagtattgtggcgaagtatttaaatcaacaattccaagaacatgacatagctgctaaacaatggtttgttggtgattatatgacatcacttgatatgcaaggtttctccattacagtggttccttatagtgaagaaatagaaaaaggtcttttagctccaacaacaagtcgttatttttaaataaaaatagagataatgaggtgacttttcaatgaatgtacaagacatgaaaacaagactacttagtttagttgaaacttttaaagaaaaagaaagtgaattaactgatttagatcgtgccattggtgatggcgaccatggagtgaatatggtcagaggatttgaagcgttagaacaaggtctggatgacacagatatgaagtcattatttaaatcaacaggaatgacattaatgtctaaagtgggcggtgcctcaggtcctttatacggttttagctttgttaaaatggcaaatgtcgttaaagatgatattgacaaagaaaatttaaaagagatgattgctgctttttcagaagccgttaaacaacgtggaaaagtagaattaaatgaaaaaacgatgtatgacgtaattgaacgtacaagagaagcattagataatgatgaaaacattgattttaacacattacaatcatatgctgatgaaactaaaaacatgatagctacgaaaggacgagcatcatattttaaagaagattcaaaaggttatatcgatccaggtgctcaaagtagtgtttacattttaaatgcgatgataggaggagaggtagaatgacttcaatagtaattgtgagtcacagttataaaattgctgaaggtgtcaaagatttaaatttacaaatgacagataatgacgtcaatattattgatgttggtggcttagatgataaagggattggcacatctttcgatcgtattctttcagtcataaatgaattagatgatgatgcaatatgtttttatgatatagggtctgctgggatgaaccttgatatggcaatcgaaatgtatgaaggctctcatcgtattgaaaaaatggaggcgcccgtcgtagaaggtagttttatcgcgagtgtggcacttaaatcgaatatgacgatggatgaaactatcgcagaagtcaaagaacaattaaaaaatgattaagtgaatatattatgaggtcaaagatgtgtagaggtctttgtcctctttttttattaatttaaactgcagtgattgaatgtcaatgttcatagtggttttatataataaataaattatctttcaagttttttgaaatacacattataaatgaaaactaaaataaaaattactataatatagcaatagaaaggattaaaaagatggctagaaaatataatgcgattaaatacgtcattaagaaaaataatgacgatcttgaattatatggattaagattgtatgagtttaatataaaggatggaaaagctataaatattagccaaccgatttttgtgaatagagatattttaattgataaaatacaagatggtgaagcatttactcgtgcctttagagtaagtcaaaatgattattatgcaggccaatcgattgctctatcggttaataagcatggatatattaataataattttgaggtttcgcgagatgtgattagaaacgttgaagaaagtatcttagattataaataaagtcatcagttatagaaaagcgttaaattaaaaaggaagtatagtactccctttttaatttaatatataagtgacttatttttttaataaaattttaattcctctgataatgttgaggatatataatattaaagcaattaaaaagaacacaatagcaatgattaaagcaataacaaatattaataattgatgatcgaatggtttatcaaagacctcttttgaaaaaataaatgccgctctacctataaaaaaactgatccacgttataacatggttccctaatgcttttttaccatgctcagacgttggctcttccgcaagtatccataccaataaaggtaaaatgataggtgcaaaaaagatacttaaataactcaatgctgataaaacataactattgtcatttttatgcattttactatttgtattttccacttttttcaccttctttctctttacttattataaaaacatcaataataaaatattacaacaattaatagataaacttacaacactgtaagtattgagaaaagaaaaatatcgtttgtatactttttctaaataaataactaataagtttgtatttaggattttatataactaaaagtatcaattgtgtatttataaatattaaaattaataaaatattatatttgaaaattacttgtttgctatataaagttttgatagcattaaataagtaagcgttttcactaattttatagggaggtgcataaaatgaataattcctcaataaaacaatttattgaagcgggtaatttaacaattggtattgaatttggttcaactagaattaaaacggtagcaattgatgacaactgtaaaacattagctacaggaacgtttggatgggaaaatacatatcaagacggatattggacatattctatgaacgatgcatggataggtctacaaaaaagttatagtgaaatgactaaagttataaaagaacagtatggaactacagtgaaaaaaattaaatcattaggcattagtgggatgatgcatggttatttagtatttgatcaacaagaagatttgctcgttccatttcgaacttggcgtaataacaatgctaatcaggcggctaagattttaagagaatcatttcaagtaaatattccagaaagatggagcatagctcaattatatcaatcagctataaataatgagtctcatgttgctaaagtagattacatgacaacacttgctggttatattcattggtacttaacagatgaaaaagtattaggtataggcgatgcctcaggcatgtttcccgttgatgtagaaactaaagagtatcgacaagatattgctaaaacatttaatcagcttttttctgaaatgggatatcatcaagatattttagaagtattaccaaaagttgtggtagcaggtgaaaatgcaggttatttaacagaaacaggagcaaaacttattgatccaaatggtcaattagaagcaggctgtcctatgtgtgctccagaagctgatgctgcaactggaatggtagctacaaatagcgtagcaccaaagactggtaatatatctgcaggaacaagtatcttttcaatgattgtattagacaaatctttaaaaaatatttatccagaagtggatattgtcacaacaccagatggctatgaagtagccatgatacatgcgaataattgcacatctgatattaatgcatgggttgatttatttggagaagtattagaagtaatgggtgtcaaatatgaaaaaagtgaactttttacaaaattattcgaaaacgctttaaatggtgatgataaacttgggaaattactttcatatggatatatatctggagaatttattacagaggttcaacagggttaccctatgttagtacgatcgatagatagttcattcaatttagctaatgtaatgaagactcatatatatagtgcatttagtacattaaaaattggtattgatttattaaaagaaaatgaagatattgaaattcattcaatatatgggcacggaggtatattcaaaaccaaaaaagttgctcaaacatttttagcagcagcaatgcaaagtcctgttagtgttatgcaaacagctggtgaaggtggagcatgggggattgctgttttagctaggtattttatagcagaaaacgatgtaaatttatctagttatcttaatgaaattgcttttaaagatactgagtccatcaaaattgaaccaaatgaaaaagaaatagaaagctttaatcgttatattgaacgttttaaaaaaggtcttcctatagaacgtcttgctaatgaacaactttaaagaaatcacaaataagcaaagggagaaagtggaattattgtgactaatgatttaactaaacaaaatcgtcagcttttaggattacctagagtattaattggggttatgtagcggtagctatatttatgacaggtgatagatttgaacaagcgtttttgtctaagtatattatcgatcttggatatagtgattcacaagcaggtagagtgatagctatatatggattaatagtagcactggcttcatggatgtctggagtactagcagaagtatttagtccacgtcgactgatgactttagcatttataatatggattatttttcatgttggatttttaactttaggtttagctcaacaaaattaagcaatgatgataattatgtatggtattcgtggattcacacaagagggtatattgagaagtgatgaacgtgtagaagggaaatcctcagatagttatgtgtatagtgtgttgagagaagaatatgaaaatgaatataaataacaacacatcctgatacttcgtcttgctcaagtactttagtatcaggatgttatatattatataggaaagtgataaatttgatcgctcattatcaacatatcacttatatttaagatggtttgatagcaaatgcacggacagggaaacctggcgcatctttcggtttgggactaattgcataaatgactgcgccacgcgtaggcaattggtctaggtttgttaagagttcaagttggaaggtatcttgtccaagtatataacgttctccaacaatatcgccatttttagctgtatctactgatgcatctgtatcgaatgtttcatgaccaatcgattttacaccgcgttcttcaattaagaattttaaagcatctagtccccaacctggtaaatgttggttaccatcagcatctctattttcgaattgttcaatatctggccaacgttttgaccaatctgtacgtaaagcaacaaaggtaccttcttcaatgcgcccattctccgcttcccactgttctaaatgttggcgtgtcacgataaagtcatcattattttttacttcttttgaataatctaacacgataagtggtaagactaattcttttaaatcaagatcctcaagataacgtttattctctacaaaatgtatcggtgcgtcaatgtgtgtgccgtattgtgtaacgatattccaacgttgtacataaaagccatgttctttgactgtaaataatgtggatacttggcctttttcaaattcactaaatcgtggaatgtctggatcgaaagtatgggttaaatctacccactctgctgtttttaattgttgtaattggtcccacaatggataatttgtcatatgtttcacctcgaaagtctaatataagaataaaagagggagaaaactcaatttctccctcacatgtttatctgtatcttatgcgacaggtttatttttttcttcacgttttttacgaacagtatttacaagtactgttaaggcatctttcacttcgtcttctttacgtgtttttagaccacagtcagggttaacccagaataaagaacggtcgatttgttgtaaagaacgatcaattgctgttgcaatttcttcttcagtagggatacgtggactatgaatatcatatacacctaatccaatacctaaatcatagttaatatcttcaaagtctttgattaaatcaccatggctacgtgatgtttcaattgaaataacatctgcatctaagtcatgaattgcatggataatttgaccaaattgagaataacacatatgcgtatgaatttgtgtttcatcttggactgaagaggttgcaagtttaaatgaatttaccgcatcagcaaggtattgttcatggtattcagaacgtaatggtaagccttcacgtaatgcgggttcatctacttgaatgactctaatacctgcttcttcaagtgctaatacttcttcgtcaatagctaaggcaatttgatcttgaacgactttacgaggaacgtctacacgttcgaatgaccagtttaagatagtgactggaccagttaacatacctttcacaggtttatcagttaagctttgtgcataaacagtttctttaactgttaaaggtgcagtccattttacatctccataaataactggtggttttacagcacgtgaaccataagattgaacccatccaaattttgtgactaagaaaccttgaagtttttcaccgaagaattcaaccatgtcattacgttcgaattcaccgtgtacaagtacatctaagccaatctcttcttggattttaatccaacgtgcgatttcattttctaagaagttgttatattcttcgtctgaaattcgattatttttccagtctgcacggtatttacgtacttctcttgtttgagggaatgagccgatcgttgttgttggtaaatctggtaaatgtaaacgagcgtcttgtgcttttttacggtctttaaaagcagatttacgactggttggtacgctatcaaaatcatattcaaggtttttgaatgattgactttggaatcgttcatagcgtgcttttaactcatcatattttttactatcattattattaaataatcgacgtaatgcatctaactcatctaatttttcagtagcaaagcttaagccttcttcaattgatgtatctaatgtttcatcatctaatgataccggaacgtgtaataatgaagaggaaggttgaattgcaattgctttagtataaggttgtaaagtttcgattaattcttttttcgcttcaatatctgcagcccaaacattacgaccgtcaataataccagcatataatgttttagatttatcgaaatctcctgctttaatttgttctaagttataaccgtgatcatgaacaaaatctaaaccaagaccagccactggtaaacggcttaagaattttacattaacacgttcaaaataggtttgtatgactaatttttctcctaaaccagcatcagcaaagtagtcataagcctctttagtaatattttcataattttcactttcatctgttacaagaacaggttcatcgacttgaatgtattcagcacctgcatctactaaagattgtaatacttctttatatagtggaagtaatgtttgaactttttcttcaaaagattgattaccacctttagaaagtttcacaaaagtgattggaccaacaatgacaggatgtgcatttacattaattgatttagcatagttaaaacggtctaataatacattgcgattcaccttaggttcaacattatcccattcaggaacaatatagtgatagtttgtgttaaaccatttaattaatgcacttgcaacatgttctttattaccacgtgcaatatcaaacaataaatcatcatctactgtacgtccttggaaacgttcaggaataatgttgaaaagtaatgatgtatcaagaatatggtcatataatgagaaatcaccaacaggtacactgtctaaattataattcttttgaagtaataaattttctttatgtaagtctgttaatgtttgatctaattcagttttatcgatttttttagcccaatagctttcgattgcttttttccattctctttttctacctaatcttgggaatcctaagtttgaagttttaattgttgtcataatattgcctccttgttttgggtaattgctttagaatatgctgcgagctctaatgaataatcaatacgttggaaaggtgtaatgagatataaaccattaaagtattcatgtaccgtatcgattaattctttagacagtctcaaacttaattcttttgttttttctttatcatcttttactgctttaaattgatttaatacatcttctgacattttaattccaggcacttcgttatgtaagaaaagtgcgttattgtagcttgcaataggcatgataccgataaaaagtggggtatcaagatgtttggttgcttcatatacctctttgattttttctttactatatacaggttgggtaataaagtaactcatacctgccgctacttttttctcaaggcgtttaactgccccgtctaatttacgaacgtttggatcgaacgccccggcgatgttaaagttggtatgtttcttcagcgcatcaccatcaacattaataccttgattaaatcgtagcgcaagttctgttaagccttttgaattaacatcataaacattcgttgcgcctggtagatgacctacttttgaagggtctcctgtaatggctaaaatttcactaacaccgatgagtgaaaggccaagtagatgagattgtaaaccaattagattacgatcgcgacatgtgatatgaacaagaggttcgatatcatatcgttgtttgattaaacttgcagcagcgatattgctgactcttacagtagcgagagagttatctgcaagtgtaactgcatcaatatttgcttcatctagcttacctatattctcaaagaacaattccgtatcgagatgttttggagtgtctaattcaacaatcacagtaggtctctgttttacttttgatgttaaattttgttttaatgtacgttttgcatttgtattaattgttcgatgaattggaataacttttttagttttaactggttttaaatcttttacagattctttaatgtaagagatatgttccggtgtagtaccacaacaaccaccaattaaacgaatgccttcgttaattaattcttgtgcaacatcaccaaaatatttagcattgttactatatttaaattcactattttcaatatcgagtagactcgcattaggataacatgagagataggcatgttctggtagttcgatatgtgaaaatgagcgttgcatgtgatgtgggccatggtgacaatttaagcccaccacatttgcgccacattcaatgagatgttttaacgcctcgttaatttctgtaccgtcaacgagataattcgtattggaagcggtcagttgtgcgataattggaatatcgtacttttgacgtgtcgctgttatcacactcgttaattcatctaaatcgtagtaggtttcaaatagtaaaccatctacaccttcttcaattaaagtatcaatttgattgtctgtatgatattgaatagtagaaagcgataagtcttcttgttttattcctctgaagccacccaccgttcctaagataaatgtctctttattggctgcgcgttttgcaatttgtacagcggctttatgaatttcttttactttatgctctaagccaaatacttttaatttttcaaagttagcgccatacgtatttgtctgaatgacatcagctcctgcttctatatatgaacgatgaatacgttcaactttattgggatgtgtaagattatatgcttcaggacaagtatctaggccctcggaatagaggattgttcccattgcgccatcagctactaaaacgttgttcttcaaatggttcaataatcgactcattaaatgcctccttcaatgcgtagtcaatatcagctatgagttcttcaggttgttcaagacctacgcttagacggaatagaccaaatgtaatgccacgttcgtttctcacttcttctggaacagctgcatgagacattgtggctggatgtgagagaatcgtttctactcctcctaaacttacagatacaagtggtaaagttagcgcatctacaaatgcttgagcttttgtttcatcttttagacgaaagccaatgactgcaccgccacttttagcttgtgataaatgtaaattactatttcccggataatacacttcagcaacttcatctctttgacttagaaagtctacaagcttttcagcattcgatgtagattgtctaaaacgaacaggtaatgtttttaaatgtttggctaaagtccaactatcatgtgcagatagggcagttcctgttccattttggagtagataaagtgcctcagcgacgtctttgcgatttgtaatagcagcgccagcaataatatcactatgtccacctaagaattttgttgcagaatgaaccactatatcagcaccaagtgaaagtggagattgacctaatggagtcataaatgtattatctactgctaaaagtagatcatgctttttagcgatatgagcaactgctttaatatcagtgattttaaagcatgggttcgatggtgtttctatataaattaattttgtattaggttgaatggcttgttcaatttcttcaggatgagtcgcatttaccgtcgtaaatttaatattaaaacgatttaaaatacgttcagttagtctaaatgttccgccatacacatcatctggtaaaatgacatgatcttcagcttgtaatgtgagtaatacggctgatattgctgcaatacctgaagcataagcaaatccatattggccgccttcaagtttagctaatttttcttctaataattgacgattaggattaccacttctggcataatcaaattttgcgttaccaccaagtactttttgatggaaagttgaagaatcatataatggtgggtttgctgaatcgtaatctacacctctatgttcatcaaatatcacttctgtttctttagataagctcatgaaatcactcctactttagaattttctaatgcttgaataatatctgcttcaacatccttataatcttcaataccaatggataagcgaattaaatgttcatcaataccgcgtttgtctttttcatcatctggcatgtcgacgtgtgtttgtgtatatgggaaagtaataaaggtttcagttcctcctaaactttctgcaaaaatacaaatttctaaattttctaaaaatttagctacgctataagccttattaagacgtaaacttagcatacctgtttttccactatagagtacttcatcaatagaatcggatgtttcacaacgttttgcgagacgacgtgcattgtcttgagatcgttctattctgagatgtagtgttttcaaacctctttgaagtaagtaacaatcaagtggagacaatgtggcgccaatcatattgtgaaattgacctaattgttcagcaagtgtgtcatctttaactgtcactacacctgcaagtacatcattatgaccacctatatactttgtagctgagtgtaaaacaatgtcagcaccttgttctaaaggtgttgataagtatggagttaaaaacgtgttgtcgataatggttaatagatgatgttttttacttagaacataatatggttctacatcaatttgaatcatttgaggattcgaaattggttcgataaagagtgctttcgtgtgtttatttatactattttcgacttcttcataatttaaaaaatcaacgtatttaaaatgaataccatattgttgttcataataatcaaataatctaaatgttcctccatataaatcaaaagctactaaaatttcatcaccaggtttaaataagttacaaataagttgaactgctgccataccacttgaagttgcaaatgaagctgtaccaccttctaatttggcaaatgcttcttcaaatgaagagcgcgttggatttttcgttcgtgtgtaatcatatcctgtagactgacctaggtgaggatgttgatatgccgtcgataagtaaattggattagcaattgcgccagtcaaatcctttgttaatgaaatttgtgctaattgagtatctttcatttcaaatcctcctatcattttctaaataaaaaaagcttccgtcctttaaacccgatatgtatcggatgtaaaggacgaaagcttgtttcgtggtaccacctttgtttgctactttattgctaaagtaacctcaaacagtacgccatcatgttttaggagtacttgaaaaagtgacacacattatcgtaaaatatcagatatatctgtaataaaaaaactcatttaacttttaatgataaatgagtattaacgataatttagtgacgtcggtgattccagtacgccattaaacaataaatgttaatactgtatcgctataacgggcgaacccgttgatacctcatattggcatcaacactcaaaggccattttcaaactttctttcaatgtctcttctcagcttacaagactctctgtatctgcagtgtaagttttactttccttattaccgtgtgtaatttgtgtttttttaagttaattcatagcttacagacataaattacatttgtcaacaacttttctgaaaattatgattaaataataaattcagaaagcggttgaatgattgatatatatactttctacctagtaaaatttttcttaaaaaagtttataagacttgtagatataacacgctttttttaaaattaagtaatgactttaaagataagggaggactatgagtggaccatattgaagatcaacgtattcaattaaataatgatgaacacgtacaacatattaaaatttcaagtattaaagttaatccctatcaacctagaaaaacatttgatgaggagaaacttcaagatttagcagattctataacaactcatggtatacttcaacctattgttttaagaaaaacgatcaatggatattatatcgttgtaggagaacgacgttttcgagcttctaaattagctgggttagaggaagttcctgcaattgtaaaatccctttctgattctgacatgatggaattagccattatagaaaacttacaaagagaagatttgaatgcaattgaagaagctgaaagttatcaacgattaatgaacgatcttggtctgacacaacaaaaagttgctgaaaggttaggaaaatcacgtccttacattgctaatatgctaagattactaaatttaccctctgatattgctaagcttgtaagagagcatcgcatgtcaggtgcccatggacgtactttacttgcattaaaagatgtaaatacgatgaaacgtataggtaaacaagcaatcaaagaggggtggagtgtacgttatttagagaaagttgtttctgaaattcaagacggtgggcagtctaaaaaagaaaaattaaatactccaagtaaacccaaattcatacagaaacaagaacgtgcgcttaaggaaaaatttggaactcatatagatatatctgtatctaaaaatgttgggaaaattgtgtttgagtttaaatccgaggctgagtttagacgtattatagataaacttaataaatagtatcctattaataaaataaaaaagaaaatgataaatcaaaagactgatacaattttagaagaatttttgtataataaataaattggaatacaaatttaatgtggactaaatggaaaaggagggggctatatgaatcagttgaagaacgtgttaacatcgctatttcaaccattaacagaacccgaagtatatacaaatttagcaactaaattagcaatggttattatttatattttagtaggcttaattgtaattggaattattaataaagcgatagaagaagcatttaaatttcaaaataaaagtaatagaggaaataaaaaacgctctaaaacgctcgtgtcccttatcaaaaatgttgtaagatacattgtgtggtttatcgtgctcacaacagtattaagtaaatttggaattagcgtaaacggaattatcgccagcgccggtgttgtaggtatcgctattggttttggagcccagactatagtcaaagatattattactggatttttcattatttttgaaaatcagtttgatgtaggtgattatgttaaaattaatagcggtggtactacagttgctgaaggaacagtaaaatctataggattgagatcaacgcgtattaataccatcactggggagttaactattttaccaaatggtagtatgggtgagattactaactattctattactaatggtacgtcaattgtagaaattccagtctcagttgatgaaaatttagataaagttgaaaagaaattaaataaattatttacagcaatgcgtagtaaatactacttattcattactgatccagttgttttaggaattgatgggttagatgaaacaaaagttatcataagaatatcagcagaaactattcctggagaaggtgcttcaggttctagaattttacgcaaagaaattcaaaaaatgtttgtacaagaaggtattaaattgccacaacccatgtacgtaagaaataccgataaacaagacgcttaataaatgttgggggtaatgttgtgacaccaaaatatggtataaatgatatagtagaaatgaaaaaacaacatgcttgtggaacaaatcgatttaaaattattcgcatgggtgcagatatacgaattaaatgtgaaaattgtcaaagaagtattatgattccacgacaagtgtttgataaaaaaataaaaaaaatattagtatctcatcaagatacagaaagttaggagaatgattcatggctttaacagcaggtatcgtaggtttgcctaatgttggtaaatctactctatttaatgcaattacaaaagcaggtgcgctcgctgcgaactatcccttcgctacgattgacccgaatgtcgggattgtagaagtaccagatacacgtttgaataaattaacagaaatggtagaacctaagaaaacgattcctaccactttcgaattcacagatattgcaggtattgttaaaggtgcttcaaaaggtgaaggtttaggaaataaattcttatcacatattcgtgaagtagacgctatttgtcaggtagtacgtgctttcgatgatgaaaatgtgacacacgtcgctggccgtgtaaatccattagatgatattgaagtcattaatatggaacttgttttagctgatttagaatcagtagagaaacgtttgcctcgaattgaaaaaatggcacgtcaaaaagataaaacagccgaaatggagttccgcattttatctagaataaaagaagcgttagaagaaggaaatccagttcgtagtttagattttaacgaagaagatcaaaaatatgtaaatcaagctcaattattaacatctaaaaaaatgttatatattgcaaacgttggcgaagatgaaattggtgacgatgaaaatgataaagtgaaaaccattcgtgagtacgcagcaaaagaagattctgaagttatcgtcattagcgcaaaaatcgaggaagaaattgcaacacttgatgatgaagataaagaaatgtttttagaagacttaggtattgaagaaccaggcctcgatcgtcttatcagaacaacatatgatttgttaggattatctacttactttacagcaggtgttcaagaagtacgtgcttggacatttagacaagggatgacggcaccacaatgtgcaggtatcattcatacagacttcgaacgtggtttcattcgtgccgaagtaacaagttatgacgactatgttgagcatggtggtgagcaaggtgcgaaagaagcaggtaaacaacgtttagaaggtaaagattatattatgcaagacggagatattgttcacttccgatttaatgtataggaatataaaaaagcgcgacatctatttattatagacgtcgcgctttagttatatcattatggttatatcttaaaaaaacggtataactttacttgctttaacaatatctttggtgctaaaaaactgtttaccttctccagtataagctggctcaagaatcatattggcttttgcacagtatagccactctggagtgataccgcaatttaagatttcttgaaactcttgaaaatctttattccaatctaaatctaattgcatagttacacctcaaggacattatagaatatcagttctcttttgaaaagatatgtttaaagtttgaatataaatttataggccaatacgataaatcttatccactttcagacaaaatatttcaaataatatttattgtaaaaagtaatcacctatgctataattcttgattgtgagtaatgaaaattattccttgcctatggataggattcgataggccgcatagaccacaaggaggtgcaattataaaatgagaacatatgaaattatgtatgtcgtacgtcctaacattgaagaagatgctaaaaaagcagttgttgaacgctttaacggtatcttagcttcagaaggatcagaagttttagaagaaaaagactggggtaaacgccgtcttgcttacgaaattgaagatttcaaagaaggcttctacttcatcgtacgcattaaaacagataataacaaagctacagacgaattccaacgtttagctaaaatcaatgacgatattatccgttatatcgttatccgtgaagaccaagataagtaataattaaatgggggcgttgaaatgataaatcgagttgtattagtaggtcgtttaactaaggatccagaatacagaagtactccctcaggcgtaagtgtagcgacatttactctagcagttaatcgtactttcacgaatgctcaaggggaacgcgaagctgactttattaacgttgttgtatttagaagacaagcagaaaacgtaaataactatctttcaaaaggtagtttagctggcgttgatggtcgcatacaatcacgcagttatgaaaatcaagaaggtcgtcgtatatttgtcactgaagttgtagcggatagtgttcaattccttgaacctaaaaatgcacaaggtggacaacgtcatcaaggaaataatgatttccaagattatggccaaggatttggtggttcacaatcaggacaaaatacatcttataataataacaatcgtgcatcaaacaataatcaatcagataacccatttgcaaatgcgaatggtccaattgatattagtgatgatgacttaccattctaacgaaagaatgagattaaaaatataaaaggaggtaattaaccatggcaggtggaccaagaagaggcggacgtcgtcgtaaaaaagtatgctatttcacagcaaatggtattacacatattgattataaagacactgaattattaaaacgttttatctcagaacgcggtaaaattttaccacgtcgtgtaactggtacttcagctaaatatcaacgtatgttgactacagctattaaacgtgctcgtcatatggctttattaccatatgttaaagacgaaaactaatatataattagggttaaaccccgtaagctcaaggcttgcggggttatttttatgtcgagtaataaaaaatgagcagattatacatattaagttgattttaaaatgtattgggtaatatctttaagggatgcaatataaaatgttatcattaaaagagatatacataaggagttttgatgataatgagaggaaaatatttattagcaggtattgttgcatctactttacttttgggtgcttgtgatttaaatattcatttaccaggcggaaataatgatagttcagaggataaacaaaaaactgagaagagtgataataataacaaaacgcctaatagttcaaataaaaataataatactaataatgagaagaatatagattcatcagatacacaacaaaatgataatgatgaaaatactaattataatcaaactgaagatattcaaccaaatgataataatagtattcagtcatccgaacagaatactcaaaaccaatctgaaaacggaatcaatggaaataatgaaacgactacaaatgaaagtcattcaactagtgacaatcaatcaaacgattcttcgaataaagaacttacacctcagcaagcagaggatgttgtctatgattggtataaaaatcaaggatttggacatcgtttaagaaatgaatttaattacaatcctagtaaaagtactgacgatatgtattatatagattatgcagcaagtgacgcttatggtactggtacaccttatgtagctattgtagataaacatacaggtagtattgttgataattataataatatgacagatgaagaaaaagctaaaagaaaacaaatgaatgaaagtaaattagaacaaagtaaccgacaacgaaataatgatgtacaaaataatgaaacaaagaataataatgaaacgcaacatacatcatctaatgaagaaaatcaaaatagcgcgcaatctgaaactcaaaatgatgtccagacatcgaatcaatccgagaacaatcattcaacttcaacagacgcttctacacaaactaaagaagaacccacaacttctcaaatggatcgtaatgaacaagcacaaccaaatcatcaaagtacaaataccgaagaataaaaacaaaggaacaagacattatattcaacatgaatatgttttgttcctttaaagttgtttatagtcgaatatcaacatcatcaaattgttgttgatattctttatatttactttcaactagaacttgataagatgtattgaaataatctgccagaatcattgcatctttgaactttggttcatgttgatgattttcccattcgtataattgatgtggttcgtaatgtgtgccatactttttgtttaggatttcagttaattcattaatttcaagatgtcttttttttcttaagttatacagtgcatgtgaactcataatacataacctcctaagtatcaattttgtatataaacaaaattttattatatgaaaatttattaagtcttttatatattttattataatatgcttgttcataatgtttagcaagtattttatataaaaatagttgctatttttaggagccttatatttttaatcattaattgaataaatactaataaaatatgtgggtgttattatttagttgtttttgttataaaaaataaattattttaataatgatgtttataaaattgaaataggtggtatgaataagaagtaaataaaataaaactataaggagtaatctaactatgggctttattattatgataatagttggtggattaatcggttggattgctggcatgatcatgggtaaagatatccctggtggtatcttaggtaatatcattgctggtttaatcggttcattcatcggaagtaaattgttaggtacttggggtcctgtttggggcggagtaccaatcttcccagcattaatcggtgcaattattcttatttttattgtttctttaattttaaaagcaatcaaaaaataagtatagtatttaaagaggactacgttatgtagtgctctttttttatttattaaactaaaaaaagaggatgacgtcgggttaagacgtcatccaggagtattatgttcatgaatataaaagacttgtagttattaaataactacaagttaatagtatcatgcaatataaatattgacaatcataaaaacttatattatttaaaaatatataatttgtattattagtagacttcattcaattattatttaatataataaattgaaataggaggtaaaacatgaatttatatcttattcgacatggtgaatcacagtctaattacgataataagtacaatcgagcatattattgtggtcagttagacgttcctttaactgaaaggggcattgaaagtgcaaaaaacttaaagacgtatttttataatataaaaattgatgatgtgtatgtatctgatttaacaagaacaaaagaaacatatcaatatatcttcccttacgatatcccaactacagttacctcattattacgtgaacgttcattgggtctatttgaaggtcaatttaaggataaacttatgaaaaataataagtatcatcgctattttcatgattcaaattataaagattttcgacatagctttattcaaaaagcgcctgagggggaaagttataatgatgtttatcatagagtgaaacagtttttcgaaacgatccatattcaagataatcacacgatagtcattattgcacatcaagttgtgatacgttgtattatggtttactttggctatataaataaagaagaagcattaactaaagtaattgaaaattgtaagccatatcttattgagttataaaaaaatctgagacatcattcatcgtctcagattttttatatattagacgttaccattaatggattgaataacatattcaaacggatactacctattctatttatcaaaaacatctgttttgatatctttcttatttaagaaagatttgattttattttgttggtttccatttacatctccagcataatgagtaggaacatctacaacgttaattgtattttgaggttggtaattcagttgttcgatactttcatcaacatttgcaattgtactattcaaagcatgaaagtatttaataatacgatttacatgatctttatagccgtctggcaatgtgttattttcaacatattttttaaagtgtaagtcatttttaacagcaatattagataaattactaagttttgtagcttgtttatcagtgatttttgtttgtcctgaactttgacggtcgatttgactttgcattatatatttattatctaaaatatcactattaacatctagatattttttgattgcttggttcatttcatcttcagtaagcttttgatgtgatttattcgatgtaaaaatatcattttcagttaagtttttagcatgtttcggtgcattaacaccgttactttgattatgattgtcttcgttattatcattattaggtgcacaagcacttaatattaataacaatgctaaaaaactactaataatcatactctttttcatagatttcaataatctcctttattagtaaacgtttctatttaagcataataatagagtatcatttatagaaacagaattgaatgtttaagacttaaaattaatataaatctatgaacaaattgtggcaatatcagtaaaaaaataaattaaaaaagcagagccattaataaaatgactctgcttaaaatgaagatatttgataggttaagttctaagtcttactttcatgtagaaagttaaactgtaaattaatttctaataatataatcaaatgcactcaatgctgcgttagcacctgaacccattgatataatgatttgtttatatttttggtcagtaacgtcaccagcagcaaaaataccaggaatgtttgtgttattttcacgacccacaacgacttctccacggctatttaactctactgcgtcaccaatccattttgtatttggcacaaggccaatttgtacaaagataccatctaagcttaattctttcatttcaccagatgacatatcttcatagcttaaaccagtaacatgatcttcacctagaacttcggcagttctagcatttgtgtgaatatcaacattagggaaagaacgtaaacgttcttgtaacactgtatccgcttttagttctggagcgaattcaaatagcgtcacatgtttaactattcctgctaaatcgatagctgcttcaacaccagagttaccaccaccaataactgcaacgtttttattttcaaataaaggtccgtcacagtgagggcagaaggcaacacctttattgattaagcgatcttcaccaggaatatttaatttacgccagcttgcaccagttgaaataatagcagttttactttcaagaactgcatcattttctaaagttactcggatagctttatcagttttttcaattttagttgcacgaataccagtcatagcatcaatatcatactcttcgatatgtgcagctaaattagaagagaattctgatccagtggtttgtttaacagtaataaagttttcaataccagctgtatcgttaacttgaccaccaattctatctgcaacaataccagtgcgtaaacctttacgcgcagtataaattgcagcactaccacttgctggcccaccaccgatgattaatacatcgtatggatctttatcttcgtattctgaagcatcttgtgtactgccaagtttagataaaatatcagaaattgtcatacgaccattaccgaattcttcaccatctaaaaatacagcagggactgccatgatatccttagattcttcacggaatacagcaccatcaatcattgtatgagtgatatttggattaattacactcattaagtttaatgcttgaactacatctggacatttttgacaagttaaacttacataagtttcaaaattgtagttaccttcaagacctttaatttgatcaatgattgattgtttttctttaggcgcacgaccacttacttgtaaaatggcaagcacaagtgaattaaactcatgacctaaaggaataccagcaaatgtgataccagtatcttcttcaggtttacttacttgaaaacttggtgtgcgttttaattctttttcaacgattgtaatatgatctgtcatctcagcgatttcatctaataaatcttttaattctttagatttatcatcagagccgatacttgctctaaattctacatcgccttccataagttgtaataattgttgtaattgttgttttaaatcagcattaagcatacttaaatgcctccttaaattttacctactaagtctaatcctggttgtaatgattcagaaccttcttcccattttgctgggcaaacttcacctggatgttgacgtacgtattgtgcagctttgattttatttactaatgtacttgcatcacggccaataccatctgcattaatttctgctgcttgaactacaccatcagggtcaacgataaatgtaccacgttgtgccaaacctgcttcttcatctaatacatcgaagttacgagtgatgatttgagaagggtcaccaatcatagtgtattggattttgctgattgcgtctgaatgatcgtgccaagctttgtgtacgaaatgagtatcagttgaaactgagaatacattaacacctaaatcttgtaattggctatattggttttgtaaatcttctaattcagttggacatacgaaagagaagtcagctggatagaagcaaacaacgctccaagaaccttttaaatcatcttggcttacttctttgaattcatcatttttaggatcatatgcttgagctgtgaaaggtaagatttctttattaattaaagacataacttaaattcctcctgatttatcgaatattaattagaactacataataattattgcttatttataataattctaatctcttgattaatattattacatgtagattttatttcgtcaacataatatacttaaaagtaaggaaaacattataaagcactgatataataaggtttatataaaaaatattaacttttttaagatattgtgaggtttatttttcctaattaaaaaatgtaaattgtaaatacaaatacatcttttcgcttaaatctattctcaactaaaggaaagtatttgataatggaaatcaaaaataatagatgaaaactctcttcaagttacgctatgaaacatataaatctgaagagagtatcaagtattttcaatattattttattaaaatcagtctttgacttctacttttacacttcctactttctcgtattcagcaatataaatacctttttctaaatgtagtggtgaaataaatgtacctgaagaaataaattgacctttttctaaacgttttccatgtgaatgtaattttttatttaaccattttatagattcaataggatttcctagtacgtcactagaatgtcctgtttcaatttcttgatcgtttttaaataactttaagttaatatcagcaaacgatttgtaatcaagaggtgttactctttttccaaccacaattaaacctgttgcagtattatctgaaattaaatctgataaagcaaagttagggaaccaatctttataacgtgcgtcaggaatttcaatacctggagctacttttacactttctaagatggtttgaacatctgcattctctggtaaatctgcagttaattcaaagataagttcaggttcaagtaatggatcaaataatgttgataatgagatagagttaccaccttcgactacttgagtagataaaatagtaccgtacgcaggctcatttgtattggcaatggcttgagtggcggcacttgtcatacttactttgtaacctttaatttctgatttttgcttattttttaattgattaatgagatcatcttgtgtgtgataggcttctaactcatttagttcaaaagaggaactgataaaatcaatcggtttttttaatgtaaaagcttgatataaggctgttgaaacttctttgttagcgtgagtcatagtatctctcctttgatatctgaaaattgtcattattatgataactttaattagtttagcatgcaaatcttaatttaaaataaagggcaatttagaagaaaaataaaatataaattgttaacatatattcagtaattaaaaaaggagtggacttaatgtcagattatgtttacgaattagctaaaaaacatcattcagttcgaaaatttaaagatcaacctttaagtgaagacgttgttagaaagttagttgaagctgggcaaagtgcttcaacatctagttatttacaaacgtattcaattattggagtagaagacccagaaattaaagcagaactcaaagaagtatcaggacaacattatgtggtagataatggctatttattcgtatttgttttagattattatcgtcatagtcttattaatgaagatgtagaacaacacatggagacgtcatttgagtcagctgagggcttattagttggtgccattgatgttgcattagtatcagaaaatattgctttagcagctgaagatatgggctatggcattgtatacttaggttcgcttcgcaatgatgtcggacgtgtacgtgagattttagacttacctgaatatgccttccctctatttggtatggctataggggagccagctgaggatgaaaatggatcaccaaaaccacgtttaccttttggacatgtcttccataaaaatgtctataatagtaataaagcacaacaaaaagaaacattaaacgcttatgatcaaatggttagtaaatactatcaagaccgtacaaatggtgtgagaaatgaaacctggtctcaacaagttgctggatttttaagtggaaaagcacgattggatatgttagagcaattaaataaatctggattaatgaaaagataaaataaaaccgaaaaaagagaggcagaatttgttcgaaattctgcctctcttgttatttatgattctgtggataattctccataatgattagaattaaatttttctttatctaagttacctgttaaacgtgctgtaccagtacctgctaatatagaatcattgacatttagagcggtacgacccatatcaataattggttcgatagaaattaatacacccgctaatgcaactggtaagtttaaagttgataatacaagaattgaagcgaaagttgcaccgccaccaacgccagctacaccaaatgaactaataactacaacagcaattagtgtaagaatgaatggtatatctatgtcaacatgagcaacaggagcaaccataatagcaagcattgctggataaataccagcacatccattttggccaatagacaagccgaatgaagctgagaagtttgcaataccttcaggtactcctaaacgttgcgtttgagtttgcacatttaaaggaagcgctcctgcacttgaacgtgatgtaaatgcaaaaatcagtacttcaagtgtttttttgacataacgaatagggttgattcccataatcgctaaaataattaaatgaataacatacattgtaagtaaagctgcataagatgcaatcatgaatttacctaatgtccaaattgctgcaaaatcacttgtagcaattgtagaagccataattgcgataattccataaggagttaatcttaaaacaaaggtaacaattgacatgatgagagcataaacagcatcaataccacgttttaataagctaccattatcaggttgtttacgtgcaacacgtaagtatgcaaatcctacaaaaatggcaaatattactactgcaatagttgaagttgttctctgaccagtaaaatctaagaacggattgcttggtaataattcaagaatttgttgtggtagtgtattcgctgtaagttgctttgcctcactactaatttcatttcctcgtgcatgttctgcactacctaaatcgatacttgaagcatcaaggccaaatacaatggcataaaaaatacctacaacggctgcaatagcgacagtaccaattaaaaacataaaaatataagaacctatcttagcaaatttatcgccaatttgtatcttactaaatgctgaaacaatagaaataaaaataagaggcataacaatcatttgtaataatgtcacatagccatctccaacgatgctaaaccaatcagttgtagtttcaagcactttagaattaacaccataaataaggtgtaaaataataccatatacaattcctaatcctagagcggtaaagactcgtttagggaatgatacatgttttttagccataatgaataagccgataatgaaaatcaacattatgacaatattaataattgaaaataatgttcccatataatgattctccttttattagttaaatccgacacatttcataagaatagtattaaatatataataattcaatactttaaataacataaattactaaatatttttacaaattaattataaatagatactaaatgagtattaaaacaaaaaacaggatcgaaatctttttaatttcaatcctgttttagtaaatagcactatatacaattgttacattaaagattaaatagtctagctaagaatccttttttctcatttgaagatgaaacataagtttgatgttcttttaaattatcaatcgcttgttgattgttatcattaatttctttaactaaattatttttagtataatcagattgttctttttgagcagtttgaatggcttgttgtgatgtttggatggcagctaatgactcattatttgctttcaatttttcagtaatttgactttgtaattctttaagttcattttgctgttgatgaacttgagtaatcatctgacctaacatttgacgttcttcacgcattttttgtatttccgtacgtaagtcttctaccaattgtgtgacgccttgatcagctggtaactgttgttggtcttctttaacgataacttgtaaaaaatctttttctttttctaattcttcgaaagctaaatcatagctatttgtttgttttaccttttctgcaatatcttggaaaagttcaatatcttcttctttaaagtctgtagcctcacgaccacgatattcagtcttactaagttgatatcctcgttcttctaaatgttggacgattttgcggacttgtttttcacttagtttgacacgttgagcgaattctttagttaacataatttgaagtcctttcgtatctatagaatattgttcatttacactgacgtttgtcttcggttagtgacacgtcagtctaacctcgcatattagtttaaccttttatatcgcgcttttcaagtgttctatcaaggtaaacgtaaattcatcttttctaaaagggggtatataatatctctagaaattccattcgcaaatacatatttgagaatataattagatttcacactagtaggatagatgtcttttgtaagttcaatgttagatttaataaataagtcagtacgtataggtgtttcttcaaacgtatagttaggatgcaaatagtcaatgtcatattgttgttcaaagtcattttctaataagatatgatgacgtcgtttaattaattgattatctaatatactattatcaagtttcgggacttcaatcattaaaaagttaatatctctagaatgtactttattagataatatatttaggtgtgtttcaacttcatttaaagtttgagatatgatttcatcatagtttgaatcaattacagctaataagtggactaaaaaggctgaatttgttgttgcctcgtagtgcgctgtagccaaactgattatattttctttctcaataccaacaatcaaaacataatcattttctgttttattattctgtaaggaccgttttgtgataatgctgtcttcaaaaaaatcaacatctaattgtttattataaaactcgacggctttttgataataagcgtcttctaaagaatgaatagtgtgaaatttcatagcgatctccccgcatcatatttttttaagtatagcacatttgtaaagtagcacatcataatacaaaatatattaaaaaacttctttcaaagttataaatgattcacactttactttgaaagaagcatatattaatttttgactgttaatttgtaagaaattatattcatttaacaatcgacatgaataaatacaatgaatggttaaacttatttttaagattttggacccttagactcattagcgtaatgagtgatatcaacttcttcataagctgcgttgtttttttcaacttcattatgtgaagaagcgtcttttctagcgattactaaaaatttgccatcaagcatatcttttttatattgttctgcttggttatcagatagtttgaaattattcaatacagcttcttcaccatcttcaccggttaataagcgtgacatgcgatcactgaatgaaccacttgttgctataagtgttacttgagaattatgtaaatcatctaaatgtaatttagatttactgataacaaatatctcattttctgaatatccttctgcttttttcttttcaatcacattgtaaatttgattttcattatctagaactgtaatatctggcatattcatcgtcctccatcatttcatgctacttttaaatatttataccctaatgaatagatataaaacgtttctatataattatataattaaacatatgtgttttacaaatacagtttttttatatgatattaaacgcttacatttataagtagtgtgattacaaggataaactctccatcagttattgaaaataagcttaaaatttgctattatcattaaataatttatattgctcatataatctgaagaatatggctttagaagtttctaccgtgttgccataaacaacgcgactatgagttcaagtacaaaggtaaggaagttaatgagaagtttgaggattggctaagatgtcttatactatattatcatttgtataatgtaaagtattgtttatcatctataaatctaaattatttacttctaagttacaaatgaatgtgtatcgtacttgttcacttatagatcctgaaactagataaaagtttcgggtttttttatataaagtttaggaggttttgaagtggaagcgctcgaacaaaaagtcaaggaagatggcgtagtcattgatgaaaaaatattaaaagttgatggatttttaaatcatcaaattgatgccaaattaatgtatgaagtgggtcaaacattttataaacaatttaaggataaagggattacgaaaattttaactattgaggcttccggtattgctcctgcaatcatggctgcattacatttcgatgtgccatgcttatttgcaaaaaaagcaaagccaagtactttaaaagatggattttacagtactgatatccattcatttactaaaaataaaacaagtacagtgattgtatcagaagaatttttagggtctgaagataaagtattaattattgatgatttcttagcaaatggtgatgcttcacttggattgtacgacattgcacaacaagctaaagcagaaacagtaggcataggaattgttgtagaaaaaagtttccaagatggacgacaaagattggaagaggctggtttaactgtttcttcattatgtaaagttgcttccttaacagggaataaagtgactttactaggtgaagatgaatgaaaaatttaattttaagtgtacaacatttattagcaatgtatgcaggtgctattttagtacctatcattgtaggaacaagtttaaaattctcacctgaagagattgcttatttaattacagtagatatttttatgtgtggagtagctacatttttacaagcaaataagattactggtacagggctacctattgttttaggatgtacatttactgctgtagcacctatgattttaattggacagactaaaggtttagacgtgttatatggatcattgttcctatcaggtatcttagttgtgatcattgctccattcttttcttatttagttaaatttttcccacctgttgttacaggtagtgtagttacaattatcggaattaacttaatgcccgttgctatgaattatcttgctggtggtcaaggcgctaaagattatggtaaccctaaaaatctaattttaggtggagtgacacttattgttatcttactattacaacgatttacaacgggattcttaaaatctattgcaattttgattggtttagttataggcactatattggctagtatctttggattagttaatattagccaagttggtgacgcacattggctcggtattccacgaccattccgtttctcaggatttggctttgatttcggtgcaacattagtgtttacaattgtagcaattgtaagtctgattgaatcaactggtgtatatcatgcattaagtgaaatcactggtcgtaagctagaacgtaaagattttcgtaaaggttacactgcggaaggtctagccatcattttaggatcaatctttaattctttcccttatacagcttattcgcaaaatgtaggacttgtttcactttctggagctaagaaaaataaagtcatatacggaatggtagtcttacttttaataagtggttgtatacctaaactaggtgctctggctaatattattcctttacctgtattaggcggtgcaatgattgctatgtttggtatggtaatggcttatggggtaagtattttaggaaatattgatttcaaaaatcaaaataatttattaattattgctgtatcagtcggacttggtacaggaattagtgctgtacctcaagcatttaaagctttaggagaacagttcgcttggttaactcaaaatggtattgttttaggagcaatctctgctattattcttaatttcttttttaacggtataaagtataaacaaaacgacgaaaatgtgaaataataagattaactatataaaaaatggaggctgtgttataaatgtgggaaaataagtttgctaaagaatcattaacttttgacgatgttttgttaattccagctgcatcagacgtattaccaagtgatgttgatttaagcgtagaattatcagataaaattaaattaaatattccagttatttctgctggtatggatacagtaactgaatctaaaatggctattgctatggcacgtcaaggtggtttaggtgtcatccataaaaacatgggcattgaagagcaagctgatgaagtacaaaaagtaaaacgttcagaaaatggtgttattacgaatccattcttcttaacaccagatgaaagtgtttatgaagcagaagcattaatgggtaaatatcgtatttcaggtgtgcctattgtaaaagatgaagaatcaagaacactcgttggtattattacaaaccgtgacttacgttttattgaagatttctcaattaaaatttcagatgtgatgactaaagaaaatttaattacagctccagttggtacaacattagatgaagcagaagcaatccttcaaaagcataaaattgaaaaattaccattagtagaaaatggtcgtttagaaggtctcatcacaattaaagatatagaaaaagtacttgaattccctcatgcagcgaaagatgagcatggccgtttacttgcagcagcagctatcggtacatctaaagatactgaaattcgtgcacaaaaacttgtagaagcaggagtagatgcgttaattattgatacagcgcatggacattctaaaggtgtgattgagcaagtcaaaaaaatgaaagataaatatcctgaccttacaattattgcaggaaatgttgcaactgctgaagcgacacgcgctttatttgaagcaggtgcagacgtggttaaagtaggtattggaccaggatcaatctgtacaacacgtgtcgttgcaggtgtaggtgtaccacaaattactgcagtatatgactgtgctactgaagcacgtaaacatggtaaagcgattattgctgacggtggtattaaattctctggtgatattattaaagcattagcggctggtggtcatgctgttatgttaggtagcttattagctggtactgaagaaagcccaggcgctactgaagtcttccaaggtagacaatataaagtatatcgtggaatgggttctcttggagccatggaaaaagggtcaaatgatcgttacttccaagaagataaatctcctagaaaatttgttccagaaggtattgaaggtcgcacagcttataaaggaccattacaagataccatttatcaacttatgggtggagtaagagctggtatgggttatactggttcaccaaacttaaaagtattgcgtgaagaagcacaattcacacgtatgggccctgcaggtttagcggaaagtcatccacataacatacaaattactaaagaatcaccaaactattcattttaatgtaaggtgagcaagaagcgattaaattaagaaagtacgcttttctataaattgtttatagaggttgaaattatttattgtctttataaatatgaaaagcgtctttctattgtttacataaattaatttaaaggagatttactattatggaaatggctaaagaacaagagttaattcttgtcttagatttcggtagtcaatataaccagttaattacacgtcgtattcgtgaaatgggcgtttacagtgaattacacgatcatgaaatttctatagatgaaattaaacgtatgaatcctaaaggtattattctttcaggaggtccaaattctgtttatgaagaaggttcatttacgattgatcctgaaatttataatttaggtattccagtgttaggtatttgttacggtatgcaacttacaaccaaactattaggcggtaaagttgaacgtgcaaatgaacgtgaatatggtaaagcaattattaaagcaaaatctgatgagttattctttggtttaccagaagaacaaacagtgtggatgagtcattcagataaagtcattgaaattcctgaaggttttgaagttattgctgatagcccaagtacaaattatgctgctatcgaagataaaaaacgtcgtatttatggtgtgcaattccacccagaagtacgtcatacagaatacggtaatgatttactaagaaattttgtccgtcgtgtatgtaattgtacaggtgaatggacaatggaaaacttcattgaaattgaaatcgaaaaaattcgtgaacgtgtaggcaatcgtaaagtattatgtgccatgagcggtggtgtagattcatcagttgttgcagtattattgcataaggccattggtgatcaattaacatgtatttttgtagaccatggtttacttcgtaaaggcgaaggcgatatggtaatggaacaattcggtgaaggctttgatatgaatattattcgtgtaaatgccaaagaacgttttatggaaaaactaaaaggcgtttctgatccagaaaaaaaacgtaaaatcattggtaatgaatttgtatatgtgtttgatgatgaagcggctaaattaacagatgttgatttcttagcacaaggtacactttacacagatgtgattgaatcaggtacaaaaacagcgcaaacaattaaatctcaccataatgtaggtggattacctgaagacatggaatttgaattgattgaacctattaatacattatttaaagatgaagttcgtgccttaggtattgaattaggtatccctgaacatttagtatggagacaaccattcccaggtcctggtttaggtattcgtgtgttaggtgaaattacggaagataaattagaaatcgttcgtgaatctgatgcgattttacgtgaagtgattcgagaagaaggtcttgaaagagagatttggcaatacttcacagtactaccaggtattcaatctgtaggtgttatgggtgattatcgtacgtatgatcatacagtaggtattcgtgctgtaacatcaattgatggtatgacaagtgattttgcacgtatcgattgggaagtattacaaaaaatttctagtcgtatagttaatgaagtagaccatgtaaaccgtgtcgtctatgacattacttctaagccaccaagcactatagaatgggagtagcccattaaaaaaagcgagcattttcgtgagaaatgctcgcttttttttattaaattcaataatttggacgtttatgctaatttctttttgattgaaatgattatcgtctttgttgtaatgatgttctatggtgtactttttgaagaatatattgatacaccatcaatgatatgaataaccatgaaaaactaaaaaatatgccgccaactacgtcagtgagatagtgagcatggaagtataatcttgaaaataaaatacctaaccatactacaattaacaccgtatttattatgcgttttacccagatagttcctaatttagggataagtacaaaaataagagcaaaaataacaatcgtacttgttaaagcatgtccgcttgggaatgaaaatcctgcatcaattgttaagtgatcataaggtcttgaatgatgaatgatgtcttttaacgcaatacctatgatacctgctgaagctactgttgtcggtaaccatattgctaataagaagcgtcgcttaattaaaacaatagttgcgatgataagggtcagggtaataaaggttgcaatatcaccgtatgatgctagaaacgtcataaagtcattgaaccaattacctttgaaattcatttttggttcgccaaatgtgtttaagaaccaatagaatgattgtaaatctaatatatgtgtccataacgacttagtaaaaaccgaaaaaatagttattaaaaaaatgagactacttattataaatgaaatggttaatgtatattgtttattttgcatcagtactatacctttctttattttaatctagtttaacttgttaaagcgctaaagttatcgatacaaagaatgatttaatattaaaataaatttaaagacaaaaaagctaaggtaatcacaaaaatatgatagtcatccttcattattcaaaaaaagcaaataaaatattaaaaaactttacaaaaaaattaagcgttttcacagaattgttacatgaatattgaacaaaatatgttattttataagtaatgaagtaaattcattttatccgtgagagtttgggacatactttatcctctcaaactctttttatatattagaaatttgacttttagttgatattttcatatattgtatttaatatgcattaaattatacataggtttatatcaagcaatgaggcaaaaagtatcatttactttattgtttaattgaagggtaaaactaatgtacttaaatctaaattataggttgcttaaagagcattaataaatatattgaatgagcataaaagaagcctacaatagatagtcgtcctttttaataggataaaactaaactattgtaggtgttttattatattataagcaatagttatatataggttacagtttaaaagtggaggaatgataatgttaagtatgagtagtttacttatattattttttataacgcttattatggcagcgttaagtgggttgattgttttaatcccctcagttccagttaaatacataagatttcacttagctttacttctattgccagttattgtaggtattgtagggttagtgactataaatgaaagagaagttattggcatatttgccttagataaacttgcttggttagtaggtgcttttgttttagcgttaggttttattattcaaaagttttcaacgcgttatttattaggagatcacaattatcgtaagtattttcctttatatacatttataactgtttttgcttcactaggatggttaagcaatgacttacgtttaatgactttatgctggggattaacgttattttgtttaacgcaactaattagattgaataaaacttggaaagttccagcggaggcagcaaaagtttctgcacgttcctttattattggatggttagcgctattaattgcggttattttgctatacataggaacaggagaatggacaatcgatccttctcaaaattatgactatgctctaaatcatggtctaaaattagttattgatttattgcttgttgttgctgttattattccagctgcgcaatatccatttcagagttggttaattgaatcagttgttgcgcctacacctgtatcagctattatgcatgccggtatagttaatgcggggggcattattttaacgcgtttttcaccgatatttgataattctattgctcttacaatattattaattatttctagtatttcagtattgattggttcgggcattagtttagtacatgttgattataaacgacaacttgttggatcaacgatgagtcaaatgggttttatgctcgttcaatgtgcaatgggtgtttattcagctgcgattatccatttaatattgcatggtatatttaaagctacattattcttacaatcaggctcagttgtcagacgatttaatataccaactccacctaatattaagaaatcatatggatggataatacttggaagagctcttgcattgattattgcaattgtattttttatgacaagtaaccatagcccatatattttgattagtgcatttatcttagcttggtctatctctgtatcatggaatcaacttgtagcattaaataaaggagtaatgggacgctttataggtattacaatgattgtagttgttgcaatggtttatattatgactcatcaagtatttgttaatatactccatcatgtatatatggctcctgcccatccaccgttaattagtattatcattagtattgcaattttagtgctaggtagtatttttagtatttgggtcgctcgccatcgtacatctacagcctttgctaaagtttacttatggttaattaaaattggagaagctaaatttaaatctgtagaaagccatccaaattatttaaagaaatatttataagaggtgaacatttacatgactattaatatagaagacgttgttcaatctgcacgtcgtgtgattacgccactttcaccaatttcaatctttgcagcacgtaatccatgggaagaacttgagtatcaaacctttgatcaagttgcacaatggtttaaacatgtgcgtgatattgatttatatccaagccatgcttctgtaatgacggcgcttgaaaatggtgagattgataaacatatcgttgaagaagaagtacaacaagctattcaatcttataagacggatattcctaagactcatgtggatacgtactgcaaaaatgctatgaatattaaagatattccgagagatttaattactaaagaagcctatctgaaattagaagtctcaaaactcaaaaaagtattcgaaaatgagtcatttgcttatgcacgttcaaaaagtgcaaatgcatttaatgctaaaggcgaatctttaatggatgagttaaatactcatattattaaatggtcaaaattatatttagatactttccaatcaagttggacaatgcctaaacgcgaagaagggttctatgtagcctggttacatttagcgaaatatgatccaatgttgactaaaactcaacgtaaaatgattaagatgttgccacacaactatgaagacgcattaatcatggcacttaatcatctagatattgctgaagatgaatatgaattttatttaactggacatcttttatcgttaccaggttgggcaggtatgatgtattatcgtgctgaaaaacatgaacatgaaaaagacttattaactcaatatcttgcaatacgccttacaatggaatgtattctattagatactgaaaaaatgagccgtccggcagtcttaaatgttgaaaaaagaataaaagaacttgtgagtaaatggttatattatggtgaaatgacgattgatgaatgggctgagatgtctattgagggtcaaattgaacacttgaagtttgctcatgattttaatccattatacttcaagaaattatggttagaagcttgggaagaaactcacgaacgcaaacttgttgagatgatttacgataaatcggtcaagcgtgacaaacaacctacaaaagtacaacttgcattttgtatcgatgtacgttctgaaccatttcgtcgtcatttagaaaatcaagggccatttgaaactataggaattgcaggtttctttggtttacctatacgaaaaaaagcattagatgaacagtttagtcatgattctttaccagtgatggtacctcctgcatatactattaaagaatatgcagagcgacatgcattaaatacgtataatcaacagcaacattccattacatccatgttttatacttttaaattaatgaaaaataatgtgctacctagtttattattgccagaattaagtgggccatttttaagtttaaatacacttgcaagtacattaatgccaaagaaaacaggcgtatttattcgtaaattgactaaaaattggttaaaaaaaccgaatgctaagctaacgattgatagagatcatcatgtacatagtgatttgcctgttggatttactgaagaagaacaaattgcttttacgaaacaagcgttacaattaatggatttaactacaaattttgcgccattagtagtacttggagggcatggaagcgaaacaaacaataatccctaccatgcatcattagaatgtggtgcttgtggaggagcttcaagtggatttaatgcgaaattacttgccatgatgtgcaatttacctttagtacgtcaagggttagccgctgaaggcattcatattccggatgagacagtatttgttgctgcagaacataaaacatcaattgatgaattagaatggatttacgttccctcattaacatcagaagcaaagaaagcatttgatattttagaagaagccatgccacgtgtaagttatcatgcaaatttagaacgtcttgctcaattacctcgtttaagcgatagagaattgaaacatccaattgcggaagcacatcgctttgcaaatgattggagcgaaatccgtccagaatggggcttagcacgtaatgcagaatttattattgggcaacgaagtattacagaaggtagtaatttagaaggacgtgcatttttacataattatgattatgcgaaagatcctgatggtcaattactaaatacaattatttctggtccagcactcgttgcacagtggattaacctacagtattatgcctctacagtggcaccacatttttatggtagcggtaataaaacaacacaatctgtcacttctggtgttggcgttatgcaagggaattcaagtgatttattagctggattgccatggcagtctgtgatggcaggggacaataaaatttatcatgctccaattcgattattagtcgtgattcaagcaccagatcgttatatacaacgtttacttaatgataatattaagtttaaacaaaaagtcgatcatcaatgggtacgtcttgcaagtattgatgaaaagggtagttttaaagattggtaagctattcgattttaatttaaaaaatgatacactaatgttaattaaacattaggagatttgttatagcaatgacgaaatcgaaaggtatgtatgaagcagaaattagtaaagcaattacgcaatgggaaaaagattttcttggacgtggttcgttgtcagtaaagacagatattctacgagatatgattatcgtcaacttacaaggtattttgacgcctgcggagtatcgtgtatgtgaaactcaagagggattacttaacattaaacgtacacgctcagaactggtggaatctggacaagatgatttaatgcaacttgttttcaaaatcacaggtactgaagttaaaagcttccatagtgatttaagtacaattactggtgaacgtattattgtttttaaattagataagaaccttgaaaaatcactttaaaataaaatgttataagtacgagaagagattaggaaatgttatataaaaaataattcctaatctctttttttacaagcgaatttttatcatttattgtaaaatctaactaacattaaaagagagatagagatgcgaacgaatcaattcaatcagaacctcttactcattatcatttgtccgactattctgatgctagaggtataaaagggcaatacgatcaatgagttaagttaagtagtcaacatattgatgaatgaattgtgtgatacatcttcaaactttaatgaatatgaagaacggatatattatttgaaagagttttcataaaatattagtatcaaatgtagtaaaggaaaaacaaatatgaaaaataaattagaagtatcgccaactaaaactatttctatgtttgttgttggattaattatttttataataacggcaatgaatgtcatttatcataccacactaatgcaaaaattagatttaaactcattacatgagttgaccaactattttggtaaacctagaagacactatgacggtacaatttggcataaaatgatgacgttttgtgctaattttggagaagtaaaatccattctctacataacgttatttttagcacttatcttaatttttaaaaattataaactttcattgtggttattagttacgatttatacaggaacttatgttaattttttaattaaacaaataatagctcgtcctcgtccgtataaccatcttttagtagaccatggatattcatttccaagtggtcattcaaatgccagtacattatttgctttagctatactcttagttgttattccacttattaaaaacaaagcgatacgatatagtattgctatagttgtcgttatattttggataggcgtattaagttgtaggttatatttccacgctcactatctaactgatgtcattggtggtttttcgttaggaatgatttgggttgctttattttcaatgacgttaccactctttaatattaaattaagaaagaagtaaagcttaagtttcataacataagtattttaaaaggggagaatactatgaaaatcaaatcaccacatccgatttatttagaaggttcaagaaaagaagcgatattattacttcactcatttacaggaactgttcgtgatgtaaaaccattagctaaggcgcttaatgaagaaaacttcacatgctttgcaccaaattatcagggacatggcttacctttagaccaatttactcaatttacgattcaggattggtggaatgatgtattagaagggtatcaatttttaaaaaataaagggtttgacactatttttgtaacggggatctcactagggggactatttacattaaagttagctgagttatttgatgtttctaaaatagcagtgatgtctgcaccaagtgaaaaagaagaaaaaagtattgcgtggcgtatggaacgttatggtcagcgcatgaatcaattattgaaatttgatgaaactacttcacaacaacaacttggaacaattcaagactatcaaccacatatcgcagaatttaaagcatttattgagataatttctaatgaattagaacgtatacatgttcccgctcgtattttgtatggtggtaatgatgatgccttttatcaaaatagtgcccattatatttttaatcatattgatagtaataacaaagatttaacatgtcatccgttaagtcgtcatttaatgacttatggagatggacatgaagacgttatcactcaagttgtaactttttttaaatctgaataaaggagtaataagatgaaacgtacattcttacttatatatacaacggtttctggaactacttataaagaatttaaaacgttccaagatggtccagactatgacacatgcatacagcgtattattgatgaatttgatgaattggcctatttatttctaaaagatgactcacaagttcattacattaatgttgatcatatcgaaagtttgaatattcaagaagtagatgaaggtcaatccataatatatgattttgaaaaataaatgtaacagtaagtttaaacgataagaatagttgagagatgtcatttacatctattcttatctttttaatactcatttatatgcatattgcactatttagtcagacatgttagagtagaacttaatcgcacacatgctttaacgcgttaaagggagatagaaaatgagtaatcaatcacaatggaaaacatcaaccggatttattctagcaagtgctggttctgctataggattaggcgcaatgtggaagtttccatatatggctggcatttatggtggtggcgcttttttatttttatttttaatctttactatttttgtaggattaccgttactgattatggaatttacggtaggaataatggggcgcacttatacgactcgaatttatagtaaattaacaggaaaaaaatggttaaatattattgggtggaatggaaatttagctgtttttattttattcggcttttatagtgttatcggtggctggattgttatatatattgggaatgtgtttttacaattattatctgttgaacatacgtcattaactcaaattaaatttgaaaacataattagtaacccgtggttaactgtgttgggacagggtatttttattcttttaacaatgattatcgttatgctaggtgtagaaaaaggtttagagaaagcttctaaaattatgatgcccttattatttgtttttctaattattgttgttgctaaatcattgacattagacggagcattagagggcgttcgctatatattacaaccgagaatagaagatatttcagttaagggtgtcttatttgcattaggtcaatcgttctttacactatccttaggcacgacaggtatgattacatatgcgagttatgcgcctaaggaaatgacgattaaatcttccgccatttcaattgttattatgaatattttagtttctgtattagcaggacttgcaatattcccagctttaaaaacatttggttatgcacctcaagaaggaccaggactcttatttaaagtgttaccgttagtatttaatcaaatgggctttggtattgtattttatttaattttcttaattctatttttatttgcggcattaacgtcttctatttctttattggaattaaatgtctcaaatttcactaaaaatgataatactaaacgaaaagctatatcagttattgcaagtatattagtatttattattagtatcccagcaacactatcatttagcagtttaagtggaattaagtttggagcgggtacaatttttgataatatggattttatcgtatcgaatatcttgatgccattaggagcattaggaacgacattagttgtaggtcaattattagataaacaagcattaaaagagagctttgggaaagataaatttaaactttttgttccatggtatattttaattaaatatatgatgcccattattattatattagtttttattgttcaattattttaacattaacaaaaataaacagagtctagaatacaaatcgttgttctagactctgtttagcataaagataatttgaattacatattttcaaacgtaacatcttgtttatgtaattcttttaatattttttcaggaattgaagaattattaatagtgacatgtttaaatatacaatcttttatttttacattttcaaaatgacacaaatccatagtgacattttcaaaaatcacttttttaaacgtgacgttatcaaattttacattacgtatattgctatttttaaaaatagaatgttcaatcgttaatgtattaaaatgattttcatcaaatgaggtaacagttaaatttgatttactaatcagcgtcttgaaaaaatttacattttcaaagatacttttatcaaaattacaattgatcatttttgaatttgaaatagtgcttacattcctaaaaataccttcgctaaaatcacaatgtttaaagtgacttttatttacttcaatttcgtcgtacattgagtttctaaatgtactatttttataatttaaatttttataatcatccttagtaaagacggataaagataagtctgctttagatgtcatcatcgattctcctttgtacgttgattcatcgtaaaatttaattcatttccagtagttcacttttatcataatatgagtacttaaacgcaataactaattacattttacataaagaatctagctttttgcaataagatataagttagcgtataattcgtagcggttgagtaagaattaaaattaaatattggaaatgaatatgattatagaaagtaggtatgttcagacattacatgagtgtattgaacgaaagatatgattacttatgatttaataggacaaacgccactagtattattagaaagttttagcgatgaacatgtacaaatttatgcgaagttagaacaatttaatcctggtggaagtattaaagatcgactagggaaatatcttgtagaaactgcgctaaaagaaaaacgtattgtaaaaggagataccatcgttgaagctacagctggtaatacaggaattggattagcaatggccgctaatcgttatcatttaaagtgtgtgatttttgccccagaaggattttcagaagaaaaaatttcaattatgcgagtattgggtgctgaaatcaaacgaacacctaaaaataagggaatgattggtgcacaaaaagaagcgcgtcattatgctgacaaatacgatgcagtatatatgaaccagtttgaaactgaacataatccagaagcctatacgcatacacttggaaaagaaattacagaggcattaccacacattgattattttgtagctggtgctggatctggaggaacgtttaccggtgtagctaaacatttacaacaatttaatgttaaaaatattattgttgaacctgaaggctcagtcttgaatggtggcaaagcacatgctcatgatattgaaggtattggctctgaaaaatggccggtatttttagaaaaatctatcgttgatgatattattacagttagtgataatcaaggatttgaaaatgtaaaacgattagctaaacaagaaggactacttgttggtagctcatctggtgcagcattacaaggtgctttagatattaaacgtcgtattgataaaggtattattgtaacaatttttccagatggcagtgatcgttatatgtcaaaaaaaatatttgaatacaaaggagaataataatgaagaaaaaaacacaaatgattcatggtggacatacgacggatgattttactggagcagtaacgacaccaatttatcaaacaagtacttatttgcaagatgatattggtgatttaagacagggttatgaatattcacgtactgcaaacccaacacgtgcttctattgaaagcgtcattgcgaatttagaaaatggtaaacatggatttgcatttggttcaggtatggctgcgattagcgctgttataatgttattagataaaggtgatcatttaattttaaattctgatgtgtatggtggaacttatcgtgctttaacaaaagtctttacacgatttggtattgatgttgatttcgttgatactacaaatattgaaaacgtaaaagattatattaaaccagaaacaaaaatgttatatatcgaaacgccgtctaatcctttattacgtgtgacagatattcgacgtgcagcagaaattgcgaaagaaaatcaactcatttctgtagtcgataacacatttatgacaccgtactatcaaaatccgttagattttggaatcgatattgtattacattcagcaacaaaatatattggtggacacagtgatgttgttgcaggtttagtcgctacatctaatgatgaattaggtgaacgcttagcatttatttctaactctacaggtggtgtattaggaccacaagatagttatttattaattcgaggaattaaaacactggggttacgtatggaacaaatcaatcgtaacgtagaaggtattgtgaaaatgttacaagaacatccatcagtacaacaagtgttccatcctagtattgaaagtcatcttaatcatgatattcatatcgctcaagcaagtggtcatactggcgttgttgcatttgaagtcaaagatacagaagcagctaaacaattaattcgtgaaacacactatttcacccttgctgaaagcttaggtgcggtggaaagcttaatttctgtacctgctttgatgacacatgcatctattccagcagatgtgcgtgctaaagaaggaattacagatggtttagttcgattatcaatcggtattgaagacactgaagatttagtacaagatttaaaacaagcgatagatacgctaaataaatagaatatagtgaaagtattaatgcaagagtgcaatagaaattgaaacgatatttattgtactcttgtatttttattatgatatttggaactaaaagagtaattcaatactaaaaatatctgaaattttcaattttttaaaaaactatattgacgcatccttaacttttgcctatacttcatatcatacgaatttaatcagaattagataagggtgaacatagtgattgaatttcagggtgtaaataaagtatttcgaaagaaacgagaaaccatccacgctttaaaagatgtttcttttaaaattgatgcgcgtgatgtgtttggtgtgattggttatagtggtgctggtaaaagtacactagtacgtttagttaaccaattagaacaagctacagagggccatgttattgtagatggacatgatattaatacatatagtgaaaaagaacttcgcaacgtaaaaaaagatataggaatgattttccaacattttaatcttttaaattctaaaaccgtttttaaaaatgtagcaatgccattgatactgagtcacaaaagtaattctgagattaaagagaaagttgaagaaatgctagagtttgtgggacttgcagataagaaaaatcaatttccagatgagctttccggaggacaaaaacaacgtgttgcaattgcaagagcacttgtaacaaatcctaaaatattattgtgcgatgaagcgacaagtgcattagaccctgcgacaacaagttctattcttcaattacttaaaaatgtgaatgaaacatttggggttacgattatgatgattactcacgaaatgagcgtgattcaaaaaatctgtaatcgtgtagctgtaatggaacacggggaagttgtagaaattggtacagtaaaagatgtgtttagtcatccgaaaacgaaaacagcacaaaattttgtatcaacagttattagtacagagccttctaaagcattacgtgcctcatttgaaagagcagataatcattatacagattacagacttttcttagataaaaagcaaattgattatccattaatgaacgagttaataaaccaatatggttttaatgtaaatattctattctcgtctatgtcagatattcaagatgaaacgatttgttatttatggttacgctttgaacacgatgcacagtttagtcgtgacacggtagaatcatattttaatgagcgacatattcaatatgaggaggtgcgttaaatgtttggttcaagcatagagtcatctcaattaatgcaagcattgtatgaaacactttatatggtaacagtatcattaattattggtgcattgattggtatcccattaggtattttacttgtagtcactcgaaaacatggaatctggcctaatgtcgttattcaccaaattcttaatccaattattaatattttaagatctattccattcatcattttattaatcgcaattgtaccttttactaaattagttgcaggtacgtcaatcggtacgacagctgcaattgttccacttacagtatatgtagcaccatatattgcgcgtttagtagaaaattcacttttagaagtagatgatggcattattgaagcagcaaaagctatgggagcatcaccacttcaaattattcgtcattttttattgcctgaagcattaggttcacttgtactagctattactacagcgattattggtttaattggtagtacagctatggccggtgctgtaggtggcggtggtattggagatttagcgcttgtttatggttaccaacgctttgatacattggtcattattattacagttgtcgttctagttattatcgtacaaattattcagtcattaggtaactttatttctagaataattcgcagaaattagttatttaaataaattattttaatattgggaggcagtttttaatgaagagaataatcggtttattattagcatctattattgtccttgcggcatgttcaggcggaggaaatagtaagaaagtaacagttggcgtagcatcaaatgatactgctgcttgggaaaaagtaaaagaattagcaaaaaaagatgatattgatttagaaattaagcacttttcagattataacgtacctaataaagcattaagtgatggagatatcgatatgaatgcattccaacactttgctttcttaaatgaatataaaaaagcacataaagatgcaaaaattgaagcaattagtacaaccgtattagcacctttaggcatctattctaaaaaagtaaaagatattaaagatgttaaagatggcgcgcaagtgatgattccaaatgatgtttctaaccaagcgcgtgctttaaaattattagaatcagcaggacttattaaattaaaagataactttggtttaagtggtacaacaaaagatattaaagataaccctaaacatttaaaaattaaagaagtagatgctcaacaaactgcacgtgcattagatgatgttgatatttcagttatcaacaatggtgtagcaacgaaagcaggcttagatgctaagaaagatccaatttatttagaaagttctacttcagatgcagttaaaccatacattaatttaattgccgttaactcaaaagataaagataataaaacatacaaaaaaattgtagatctatatcatagtaaagaagcacaagaagcattgaaaaaagacactaaagatggcgaaaaagcagtcgatttatctcaaaaagaaattaaagacattgaagatagcttaaaatagtaagttaaaaattgtagaatatcaatcgttgtttagtcgtttagcatgtatcgtaggttaatgaattaaaaatacacatatatcaagcttttttcgactcttggagtgggacagctaattcaaacatgaattctgtctcgctctttttttatatcattttcaatagtatcataaatttttgattaaatataatcacattaaaaaaatccttatttgcgttatgcaataattagactaaagaaattgatttttataaagttttaaatttataagtatcgtactaaaatttcatcattatgtaatcaaattgaaatggaatattatgatgaaatatattaatttatataagtagactacttgagtagaaaaaattaaagttaaagcactagaattaacgtaataaaactaagcgttaatacaacaattgtcatgaggacatgtcaaagataagcataaaattaaggaggcgcttatttatgaataaaaaagttcttgcaacagcaattattggaactggggcatttagtacaatatttgcacatcaagcagaagcagcaacaactcacaccgtaaaaagtggagaatcattatggtctatttcaaatcgctatggtataacaatagctaaattaaaatcattaaatggtttgacatcaaatcttatttttccaaatcaagtattaactgtttcaggctctagttcatcccattcttatagtaataactcaagcagtacatatacagtaaaaagtggagatagtttatcatcaattgctagtcgctatggtacaacgtaccgccatattatggaattaaatggacttcatagctttttaatttttccaggtcaaacattaaaagtttcagggacagcacgttcgagtagccacccacaaagtagctcaaattcatctagttcttcaagctactatactgtgcgttacggtgattcattatcgggcatcgcttggaaatataatacgacatatcaaaatattatgcgtttaaatgggttaaataatttctttatttatccaggtcaaacattacgcgtaagcggcacagcatcatcaagtagtaatacaaatagtacaagttcatcatcaaattattattatcatacaccgatttttaatcatagaaatttatatgattggggtcaatgtacatggcatgtctttaatcgtcgtgctcaaatcggtaaaggtattagtacatattggtggaatgcaaataactgggataatgcagctgcaagagatggctatagaattgattatcatcctactgtaggatcaattgctcaatcagatgctggctactatggtcatgttgcatttgtagaacgcgtcaatagtaatggaagtattttagtatctgaaatgaactttagtgcaggtccaggaattttaacatatcgtacaattccagcctatcaagttagacaatataaatttattcattagtaaaaaaatgaaggaaatgggacagaattcattttgaatccgtcgtcctaccttggcaacgtatccctaatttgcgttggacatagactttcttattgaaagtctttatgttgggaatccgggactagaattgaaaaaagcttgatacaagcgtatttttacttcagtcatcgactgccaatatattaaaaatgcctaagacaattcattatgtcttaggctcgtttttttattcgaaatgataatcttctttcacttttctaaagcttgaagctaagcgtgtcacattaacaataaatgagataaatgatgtgaatttacggaatttacgtggtgatctcatagaaactataaaatcgaacacagtacccgctgtgctaagtgctagtgatagataaactaaatttttattttttgcactatatttaagtccattatatccatccacaataaatcctgctgtacttactaaactagataagcgtgaaagttttgattgttttgccatcatacaagacctccataaaaataaaaaacaaatctgaatgttataccactcattaagaatttgtcccaatgtttgttttaatgtatgttaatatcatactaaattaaattatttttttgaagtgagaatattttaataaggatgaatagaatgattaaatgtgtatgtttagtggaagaaacagaggaccaaattttactggtacaagtgcgtcacagagaaaaatattattttcctggtgggaaaattgatgaaggtgaaacgcttttagaagctattcaaagagaaattgaagaagaactacaacttcatttttctcaagatgattttacatatattggaaaagtgattggtgaagcctatcctcaaccaaatactttgaccgaattaaatggatttaaggttaatcgaagtattaattggaatgaagttcaaattgataatgaagttactgatattcgttggttcaataaatttgatacacaatatatcgcaccagctgtaattaagtggattgaaacattttcaacataagtattgaataaataaaacagtgacatttgatgctttcaatcattaaatgccactgtttggtctttactattttatatcttcgtttaaggatgaagtagtaatgtggtgatctgtttgtttaagttgatgatatttaatcaaccgagcactaacccaagccgtgataggaatacttaacgcgactgcaatgccacctaataagatggagataaactcttgagcaaaaattttagaatttaaaatatgcccaaatgaataatgaagttgaaaaaaccaaaagaataatgttaattgtccaccaaaataagctaaataaattgtattagcggaagtagcaagaatttctctgcccacacgcataccagattgaaataattctttacgagaaagattaggattggtttcattcaactcatacattggtgaacttattgtaatcgttaaatctattacagcagcgatgacagccaacataatagtaaaaacagagaattgtagcatatttatatcaatattcattgaaaatatataggtttcatcttgttgttctgtagcaaaaccttgtagatgaccaaattttacagataaatagacgcctatgataagaagcactgttgttactatcgttccgataaatgcggcttgtgttttaatattgtaactatttaaaataaagaggttacaagcagcaattacaagacaaaagataaaggctacaagatagattggcatgccaaacagaatgaaaacaatactaataataagaataataaaatttaaaaataaagtgagataggagatgagtccttttttaccgccaagcaaaatcattaaaataaaaagtaatagtgcgagtaaaaaaattgtagtcatcggcttactcctttccacttaaatatagtgaccataagtcctattgttataggaatggtcaatacaataccgataccaccagtcagtgcacgtgtaatttctagagaccagttcatagatatagtgtaagtaaatgtattcgcattttttaagtaaattaataccatggctagactacctgataaatatgaaaataataaaatattggtcatggtgcccataatatcttggccaatatgacgtccagctaaagcccaacgaggcattgaaatgttaggcgtacgctggaggatttcgtacattccactagaaattgtaattgctacatccattaccgctcctaatgttcctataagaacagaagacataaagatatcttttggaggtagcgttaaaaaactcattgtttcatatttgattccattaccacctgtaaattgaattaataattcagtaatccctacacataaaaatgttccagataaagtagcaattatcgtaacccaagttcgtttttgccagccagttactaatactaatgtaataatagttgataaaataatggctatactcattaataaaaataaatttgtacctgaaaaagtattatgaatgactattgaaacaataataaacgcggtgttaaatagtagagatagaattgattgtaaccctacatttttgcctacaattaaaagtgtcacgataaatacgcctacaattgccacagtaaggccatcgcgttttttttctagaatagtagcatcagatggacttttttgtatatgtaacaatactttttcatttttagaaaattgctctgaatctgcttgagattttacaaaatgattattaacagttgtgatctcgtttttatacttaccgtttagaatgcgtatagttaatcgttgattatatgttgtgtcagtattatgatgctcgtctgtgactttttgaccatgacttgtttcgatatttgtgattttaccaataggtatttgataaaatgaagcattaaaaaatgtaaaaataaataatccaatcattatgaaagtaacaataataattagacgatgagtgtttttaattttagaaacatgaagtgtctttatattcattaaacctaaacctctttttaattatataatttacccctttattgcaataaagtaaatatatgcgtgttcaaaatgatattcaatcacatgttatgtgttagtgttcgttacaagacctagtgatatgttgaaactttatttagcaatgtttgaatgagatgaaatagattaaagatatctacttttttattgtcttttttaaataccacacaaaatgaacgttttaattctgtatgtgataaagagatatcctctaattgttcagatgaatgatccaacgatatataatcaggtaagagtagatggccacgacgttgttttaatagatactgaccaagagactttgtacctagtgtatatataggtactttaattacagattctaatcgttttttaatagaatcaggaaaatcgtgaagtgtatataaaggatttttttcaaattgtttaagttgtgttaagggcggattaaatgataaggcaatagcatcgtctttaggtacgtataaatgatatgtttcttcatataaagacgtaattgaaagagttgagtttgcttgtagttcaggtgtattctcaacaatagctatatcaatttttcctgaatttaaatagtctactatctgagtatgattcattaaactaggtataatgtgactatcatattctctttcaaacgtttgaataataggtgtaatcatatgagaagcataactttcttcaaaacctaaattgatatgatgagcgtttttaagttgttcttgttgaaaaagtgcaactgtttcatcaagttgttctagtatgtgagttgcttgtgttagtaacgctttaccgtgcgaagtaagatatatattgcgaccttgtctatcaaataatgggacttgtaattctttttcaagtaaattgatttggcgactaattgcagattgagcaatattaagttccaatgcagcctcagaaatatgttcacggcgagccacttcaacaaagtatcgtaattgtttaatttccatattttacctccttaatctaagtatatcgtaaatattctaattattagaatgatatcatctatttaatatattgttcagataaatattttacattatattaattgttattaacagtaaattttctgaaaattctcaaaaggagtgggcatcgtgtttaaagatagactaaaaagaggattatatgattaccgtgaggaacatgatgcatgtggaatcggtttttatgccaatatggataatttaagatctcacgatattattgaaaagtcattagaaatgttgcgtagattagaccatcgaggcggtattggagctgatggtattactggtgatggcgcaggaattatgacagaaattcccttcgaattttttaaaaaacatactcatttcgacttacctaatgaaggtgaatatgcggtaggtctttttttctctaatcaaaaagtttcaggtacacagcatgaaactgtatttaaccaatactttaacgatgaaggattgaaagtaattggttatagagatgtacctgtagatacacaagcattagcagaacatgttgcttctacaatgccttatgtacaacaagtgtttgtagatttaaaccaacatgaaacgcctgttaaacagctttatttagcacgtaaacaaattgaacaatatgcagaacgcgaacatttagatttatattttacaagtttatctcataaaacgattgtctataaaggttggttacgttcagatcaaatcaagacgttatacctagacttaaacaatgaggattatcaatcaaaattaggacttgttcattctagatttagtacgaatacattccctagttggaaacgtgcacatcctaaccgacttcttatgcataacggagaaattaatacgattaaaggtaatgttaactggatgcgtgctcgtcaacgtcaacttattaatactttatttggtaatgaaagtgaaaaaattcaaaatattgttgatgaagacggaagcgactcagctattgtagataacgcgttggagtttttaagtttagcaatggagcctgaagaagcggcgatgttacttataccagagccatggttatataataaatccaatgatgaacatgtacgtgcattttatgaattttatagctatttaatggaaccttgggatggcccaacaatgatttcattctgtaatggcgataaaattggcgcattaacggatcgaaatggattacgaccaggacgctatacaatcactaaagataattttattgttttctcatctgaagtgggtgtgattgatgttccagaagaaaacgttgcttttaaaggacaattgaatcctgggaaattattgctcgttgattttaactctaataaagtcatcgaaaataacgaacttaaaactcatattgcacataaatatccttataaagattggattgatcaatacaagattgatttagaattagacgaagttcaatatcaacgtcaattattagatgaagcaacactgtttaaagtacaaaagcagtttggctacactaaggaagatattcataaatatatgacagatcttttgataggaaaaaaagatcctattggtgccatggggtatgatgcgccgctcgcagtactaaatgaacgaccagaatcattatttaactattttaaacaactgtttgctcaagtaacgaatccacctatcgatgcttatcgtgaaaagattgtaacaagtgagttatcttatctaggtagtgaaggaaatttacttcatccagaaccgaatgtcttaaatcgtatacagcttactaaaccggttcttacattaaatcaattagataaaattgaacaaagtaagtttaacgtgaaacatttatcgaccctgtatcaagacatttcactcgaagaagctttaaatcatataggagaagaagcgattcaagctacaaaagaaggttacacaattttagtgttagatgatagcgcacttatcaatacaactcaatcgttgcattatgctatgccgatgttattagctgtaagtcatattcatcaattacttattaaagaagatttacgtatgagtacaagtattgttgctttatcaggtgaaacacgtgaagtgcatcatgttgcttgtttacttggatatggtgctaatgcagtcgttccctacttagcacaacaaacgattgctcatttaactgatagtcatcatcttgaaggttcgatttctgaaaatgttgaaacatatacaaatgttttatcagaaggcgttattaaagttatggctaaaatgggtatttctaccgttcaaagttatcaaggcgcacaaatatttgaagcagtaggcttatctcaaaatgtgattgacacttactttacaggaacacaatctaaattatcaggattaagtattgaacaaattgatgaagaaaatagaaaacgtcaaagtaatgaagaagaatatctagcttctggtagtaacttccaatggcgtcaacaaggacaacatcatgtatttaatccaaccacgattcatttattacaacatgcctgtcgtgaaaatgattacgagcaatttaaaacatttactaatgctgtgcatgaaaatagacacgaccatttacgtgatttactagaatttaaatctcaatcatcaattcctattgagcaagtagaatctgtagaatcgattgtaaaacgttttaacacaggtgctatgagctatggttctatttctgaggaagcacatcaaactttagcaaaagcgatgaataaattaggaggaaaaagcaatagcggtgaaggaggagaaaatcctaaacgatatgtcattcaagaagatggcagttatttatcaagtgcgattaaacaagttgcatcaggacgatttggtgtaactagtgagtatttacaacacgctaaagaattacaaattaaagtggctcagggtgcaaaacctggtgaaggtggacaacttcctggcactaaagtatatccatggattgctgaaacacgtggatctacaccaggtattgggcttatttctccaccaccacaccatgatatttattcaattgaagatttagcgcaattgattcacgatttgaaaaatgcaaataaagatgctgatattgctgttaaacttgtatctaaaacaggtataggaacgatcgcttcaggggtagctaaagcatttgcagataaaattgtagtcagtggttatgacggtggtacgggtgcatctcctaaaacaagtattcaacatgccggattaccatgggagcttggtttagcagaaacacatcaaacattaaagttaaatgatttacgtagccgtgtacgtttagaaacagacggtaagttattaacaggtagagatgtagcattagcgtgtgcattaggagcagaagaatttggttttgcaactgcacctcttgttgttctcggatgtattatgatgagagtgtgtcataatgatacttgtccagtaggaatagcaacgcaaaataaagatttacgtgcgctttatagaggtaaagcggatcatgttgtcaattttatgcatttcgtcgctgaagaattaagagaagttctcgcggaacttggcttgaaaacagtcgaagaactagtaggacgtactgacttattacaacgttctcgtcatattaatcctaaatctaaagctgcatcacttgatattgagaaattacttcatgcagttgatggaccgaacacaaaagaaatagctcaaaatcatcatttagatattgggttcgatttaaattatttatataaagaggcaaaacaaagtattgaaaatggtgaaacattcaaaggacaatatacaattaataatactcaacgaaatgttggtgtaattacgggtagttatattacgaagcaatatggtagtaaaggtttacctgaagaaacgattattgcagaaacgatgggccatgctgggcaaagtttaggtgcatttgctcctaaaggactattaatacatcatactggagatgctaatgactatgtaggaaaagggttatctggtggaacagttgttgtgaaagcaccaaagcatgctcgtgaaaatgaaattattgcaggtaatgtatgcttctatggagcctctagtggtaaagcctatattaatggtagtgctggagaacgtttctgtattcgtaatagtggtgttgatgtagttgttgaaggaattggagatcatggtttggaatatatgacaggtggacatgttgttatacttggtgatgttggcaaaaactttggccaaggtatgagtggtggagtatgttatatcttcccaagtgatatcgaagcatttaaaaaagcgaaccaacttccaacattagcatttaaacgcgtgcaacatgatgaagaaaagcagttacttaaatcaatgttagaagaacattatcgttatacagaaagtacaaaagctaaagatatcttaaatcaatttgagaatgtcactgaacatgtcataaaagtaattccaaaagattatgaattaatgatgcaaaaaatcgagttacaacatcgtcatttatcagaagataacgaagcaaaattagctgcattttatgatcatcgcacatcgattgaaaaagacttgcaaccagctgtgatttattaaagaaaggaaggaaaagttatgggtgagtttaaagggtttatgaaatatgagaaacaatcattagcagaattgtcactcattgaacgtttagaaggacacgaagcgttccaacaacgattttctagagaagaagcctctattcaaggggcaagatgtatggattgtggaacgccattttgtcaaactggacttcctttcggacgagaaacaattggttgtccaataggaaattatatacctgaatggaatgatttagtttatcatcaagactttaaagaagcatacgaacgtctaagtgagacgaataattttcctgaatttacaggacgtatttgtcctgcaccatgcgagcaatcatgtgttatgaaaattaatcgtgattctgtagcaattaaaggtatcgaacgcacgattattgatgaagcttatgacaatggatgggtaaaaccaaaatatccaaaagaacacaaaaatcagagcgtggcaattgttggaagcggtcctgcgggattagcagctgcggaagaattaaatcatttaggctatcaagttactgtctttgaaagagcagctgagccaggtggtttattaatgtatggtattccaaatatgaagttagacaaaactgtggttcgacgtagaattgaaatcatgcgtgaggcaggtattactttcaagacaaatactaatatcggtgtagatataacacgtgatgaattagaagaacaatttgatgcgattatattatgtactggtgctcaaaaagcacgtgacttgcctttagaaggtagaatgggacaaggtattcattttgctatggattaccttaccgagcaaatgcaagttctaaatggtgagattgaagaagcttcaattacggctaaagataaaaatgtaattgttataggagcaggggatactggagcagactgcgtagcgactgctttacgcgaaaattgtaaatctattgtacagtttaacaagtatacaaaagcaccagaagaaattacatttgaaagtaacacgtcttggcctttagcattacctgtatttaaaatggattatgctcataaagaatatgaagcacgatttggaagagagcctcgtgcatatggcgttcaaactatgcgatatgatgtagatgcgattggtaatattcgcggtgtttatacccaaattttggaagaaacacctgagggtatggtagtggttgatggtacagaaagacactggccagcagatttagtattattatcaatcggatttgaaggaactgaaacaacagtaccacgatcatttgatattaaaactaaacaaaataaaatcgtagcaaatgagcaggattatcgtacaaatcaagaaaaagtatttgctgcaggagatgcacgtcgtggacaaagtttagtcgtgtgggcaattaaagaaggacgagctgtagctaaatcagtagatcaatatctcaaacaaaaagttttagcataataatataaaaatattgacttccaatgaataatattatatgatggttattgtgttcattggaggaatacccaagtccggctgaagggatcggtcttgaaaaccgacagggccttaacgggccgcgggggttcgaatccctcttcctccgccattatcattaaaatccaagactaatcaatataaagaagatgaggctgggacataattcctaacaaaatagccagtaaatgagtttattataaattcatttactggcttctttatttacaatactacgtattgttggctcgctttcttaggggacagcttcagcctgttttttttttttcaagcagaagacggcatacgagattcctctacgtctcgtgggctcggaagatgtgtataagagacagattttgaatgtgtctcactccttataatatattaattatgttcaatttcatttgtaagtgtttctacttcatctactaattctgaaatatacgcaatagtagatttaagtggggcatttgttgttatatcaactcctgctacttttgcaagttcaactggatttttacttcctccagcttttaacgtttctaaccatgcatcgactgctttttgtccttcttttttaattttttgagagaccactgtgccaatagttaatccagctgaatacgtatatgaatataatcccatataataatgtggttgtctcatccacgttaattccattccatcagtaagttcaaccgcatcaccaaagaattgttcataaacgtttctcattaacttattaagaacgggtgctgttaaagattcaccgttatcaacttttttgtatacttctctttgatatgctgcttccagtaaatgcgtgaccatattatgataatatgtgcgagatataattgagccaatcacccatcgtttaaaacgtgcatcattactattactaaataagtagtttgccatcagcatttcattcattgtagaaggtgcttctacaaaatacatagatgcttctgaatctaataaatgttgatgtttttgtgacaatgtaaaatgaccagcgtggcccaattcatgcgctaatacgaaagtttctgccattttacctgtccatgaaataaatacatatgaatgcgtaaaataagggctagcacaatacgcaccagtatctttacctttattttgagcaaaatcaatccattgatgattataagtattatcaaccattttaatatagtcatcgcctaaaacacctaaagcaccgtgaatatattgttttgagtcttctattgaaatatctggttcataactaggatcaactgatatttttaaatcttcaaatcgcattttatctaagttatgaattctttgcagtattttagcatatttttgcatcacaggtgctaaatcactcatgatgacatcaatttgtctatcatacatttcacgtgtaacttcttgttcttgtagtaaaaaatctataacagaatcatagcctcttaaattagcctcaattttttcttgttgtacatgttgattatatgttgcagctgttgtgtgttgatatttacgcaatgcattactaaaagcttcgaaacttttacgtctaaactctggatctgaactgtcttcatactcattttcaaaagttgcataatctaaaggatacatttcatgattatgttcaaacgattcaaacgcaatatcaagcattttagttgttccatagagttcataagcactttgaaaagtaggtgacaaactggcaagcacttcttcaacttctgaagataattgataaggtttacgttttattaatttttctagataatgaggactattgaactgctcttttagctcttttaatttatcatcagagagtatcattatttcagattcaacaaatgataataaactagatatcttaccataagatgttgatagtttggcatttaatgtttgcgctaattcatttgtagtatcaacacttaatctaagttcagcataattacctaatcgatcaaattgtataagtaagtcttcatattctttaagtgcatctagaataattttagtttctgataaattatttttatatttttgattaaattgagcggatttctctaatacatcatttaaagtattataaaatgcttcatcattcgtaaataaatcttctaaattccatttttcattatctggaacatgttttctgagtggtaagcctgtgttcattttattcactcctaaatagttattctcatatatattatacataatattatttgtaaactcagttttaagcctttagtctgagtcattttaataattaagaaggtataattatttataaaagtattgtatattacatattataaaatataaaagttgaggcgttttttatgacgatatttgatatgccaaattatctttggatcacaatcctagcaatgatggtattaactgtcttttgtacattggtactgaaaaaatggttttcagcagcagtaattaccttcgttgttttagcagtattagctttctttattcctaatttttataatataacgttccagcctttattaggctatgccgcttttcttgccattatcagtttaatgattagtttccttttatggtattttacaagaggatggcgccgagaacgtaaagaaaagcaattggaaaaagagatgaaaaaatatgataacgacgagtacatgtatcgtcgtcgtgatagaagataaatataagggagtaggatagaattcattttgaattcgttatcccactcccatttatatttttaatagtgtataaaaggattattttttaaaagctttttcaattttgtttaattgatgaatagttgtttcaatgccaccttcactaaaataccaagcattagcttcaaattgatagacttggtgattttttattgctttcatatcttttatcacttgattattcaaagcagaaggtaacgttttgtcatccgcatttttagttcgattaattacaaacaatttatcaggattaattttatttaaatactcattagtaactatattaccagctgaatttgctttcattttaggatcagcgtggttaattcctaaatctttatttaagaagcctccaaatctaccagttggtccgaagacactaatgcctttatcatcaacatttaaaagtaatacggtatctttattaattacttttttagcctctttcacttcttcacttaatttatgattaagtgcttttgctttttcttcttttttgaaaattttaccaaacaatgtcgtatgttctttaattgatgaaatataattatcattatcgggactaacaaataaaatcttagcattaggcgccgcttttttcatttcatctattgttttcgtatgtgcttgtctaaatgaagcaaagataacattaggttttgatttagctaattcatcataattaggtcttcctggattgcctagatttgtatatttactgtttttaaattccgaaagggaagaaggcaaaaatgaagcaccttgtcctttagcaatagaaactattttgtcttgaagtcccatttgctgcataatatctaacgcgccataatctagtactgctacacgtttcggattaactggtactttaactgtttctgttttatttttgcctctactatgtgtatgattcttatccttaaattcatatgtattttttactgtaatggtatctttactagatgaaaaatttgaatccgattgcttatcacatgctgataagattaaaataactgataaaattaatagaatatatttaaatgatttttgcattttctaacctcctagaaagtattataatagaaaatgataatcattatcaattaaatatttacattttattatcttattttacctaaaatattacatattccttttatattgttggtgatttctttaacatgtatattagacttaaaataagtagccttattgacttatttgatgattttaaaaggggtatgttgctcataatactggaaaggtatatttagtaaaatcgtcttaatagacgagacgatagtcaaacttataagaatggatcactttttatgatattaaagtctttctttgaaataattgttattagaaataatggttccaatatcaccgataatctttaaattgataaggtagaacaaaagatataaattatttatctgcaaattcatatggtatcttgcattatgtaaactagctaagcattcaataattgattcattactatattaattatcaaaataaattatgtcacaaatatcgaacactaaattcatattagtattttctacattatatataatacatataatgtagttgatttttatcataacaaattataactaagtcaatcattttagatagatcaatgttaaccaaagaatgataactaaaatatatcattgaagtgtcattaaaatagaataggtcccctgatcgttatatatacaacttcctataatatatattatgtaaactaaattgtcgaaatctgtatttttatatgaatatcttcaatttaagctttttaacaaaatacagattatttaaagttttaatatataccttaactcgtttacatatgcccatgcattctaattttagtagtatttatttaaagttattttttctacagttcggtaatcattatctaaagtattgaatcatggatattggcattacgattcatacaatcgttcttaattatttctcaaaacaatctaaagcggaatgattccaattagattagttatttaatgatatcataactatgtatttattattcaaattataaaacactataaatttcatttattataaaatattaaaaataaatttcttttggtgtatcattgataaaaataattgatatgctattattaatttgtaggatgcaacttgtatttacaacttagaatttacctacactatttataattagtctctattactaattataaaaaagcatactggcaagattgccaatatgctttttattctaattgttattttttaatcttcttacgtatacgattcaatgttttaaatagccaatatttaggtttattaattggtttatagaaatccccaattaactcctcgatatacacattaaaccctcttttaaagcgataaacaccataatcttcactattttcagtaaaatcaccagataaaccataaaaattatatcgatcatatccatgatcaaagcaataattcatcatgaaccaatgcatcatatatggtcccatataattattgtatttttctgatgagccacctgagaaataatttacttcataagcatttgcaaagtatactccagaagctaagtttaaaatttgtccatcagtttgacgtaattcacttgcatgtaagagttctttttggtcgtgttctatttgtttatctaattcagcaatttttttcagctgtttgtcacttttattttctttagacatcatttgatcacgacgcgtttctttatcatttaaagaggtttgcaatgatttaatatagtcatctaaatcaatatatgctaatggcactaatgctttatcgccgtatgtatctataaaattataaaaatattcatctgtttttgatacaaaaccagtacgtgcttctgtttcacgatacaagtctaagaaaatatttagttcatctcttttaagaaatcttacttttactccatagtttatcgctttatttatatttcttttacgttgactatcaaactgctttttcaatgatgcaggtgtttcaccttttagataatttacgcccatccatctcacttgactagagcgatcatatttcgtagtgaaaccatgatgttcgtaaccatgtgatttaaataaattaactaaagcatcatttttttcgtgaccttctaccgaattgatatctttatcataaatttgataaatccaatatggatcaagttttacatataaacattgatgttggtgtaggtatttttctaattctcgtaggtaaaaatcaacaagacctaaatcggaataatccatcactggtccacgatttgaatagtatacataacttcccatagttggaatttttgagaaaagacttgcagcaatcactttattactttcatcttttacacctaataacacaacttcaaatccgtcattttctctagtttttatattttcagtaacttggaagtaatgactctctaatgatggattttgtacgaaggtttcatattctttaactgttaactctgtaaatttcatattcgcactattcccctcttaattcaatctttttttaatttttttaagtattgtatatagtgaatacattggtttatttataggtttaacgaaatcaccaacatattcaattacatctgcattaaatccctttttaaatttcacaacacctgcatcttcagcatcatctgtaaaatgaccactaatcccataaaaattataacggtcaatgtcatgatcaattgcataattaatcatagtccattgaactgcataacttccagcgaagtgtctatatttatttgacgttccacctgcataatatacaacttcaaatggattaataaagaagaatccagcagatattggtaattcgttaccgtgttctaattgaagttgtgttgcttcatcaattttttgctcatttgcttttaattgctgttctaaatttatttttttattttgtgcttttttgttatctggtcgtttttcaatatcttttagagctttgtttaagtctttatttaatgtctgacgttctgcatgaagttcttcaagatattcatcaaattttatatatgcgagaggtactaatactctatctttaaaatgatcaaatcgattatagtagaaactatcctctctatcagaaaattctttagtctctgatgtatcttccataaatgatctgaaaataggtaattcttctttagtaagaaatcttactttaacaccattttttttgacttttttagtatttctttttcgtaaactatccattccatttaatacatctttagcagttttatcctttaaatttaaaactgaatggaaccgaatttgtaatattggatcaaatcctgttgtaaacccttcgtgttgatatcctaattgcttcattttatcaaagaaccaatcattcccagcattccctgtaatatcaccatcatgattacgatattgataaggcaaataagggtctatacgtacgtataaacaacgttgctgttttaaatatttacttaattcgttaaagaaaaagtgaacgagctctttgttttcataatcaatgactggaccacgatttgaataaaaatatttaaaaattttcataacgggtacagcagttagcatacaagcagcaatgacttcattatctttatttttaattcctactaaatgagtttcagttttctcggcaacttttaactcataattttcagtcatttgtgtaaaatggctatatggcattttttcagtaaaatcgccaaattctgtagctgttaaatttgtaaacttcattatctctataactcctaatttagaatctttatttaatttgagttgactaattttaaaattttagcttatgtatatgttgtgaatacgcatcggtctaatctcaataagtatacactagataaggttaaaactaaaatataaacctgtatatacttccaattaacctaaatgctcttaaattcttggcttcttctatcttctccaaataataagagctgaaaatcattctttttcagctcttaaattcatatctaatttcattttaaatcaattaatactacattgctactaattcttaagtatttcatgctatgaatactctaaataatttttattttatactatgctaaccattatctaaagtttgtctaatctcccttaagtattctcctgtttgacttaagtcatcattttgaaatcttcgaacgatttcacttccaataacaacaccatctacatcttttaccaaatcttttatatggtctgtagttcttattccaaatcctgctacaactgggagagatgtaaaagatttaatcatttttatctggtctttaagctttggatgaaacgttccatcttctccagtagtagcattcatcgttacagtatagataaatccttcggcatgttttgctatattttgtatacgatttatatctgtcgtcattgctattaatgaaattatttttactactctattatgatttaattgttgttttaattgttctattaattcaaatggtaaatctggaataattactccataaacaccaatatcatcgcattttttaaaaaaggctttttctccataacttaaaataacattatagtatgtcattagaacacatttacaattaatttcattttgatgtttatctaactcatcaaatatatagtcgattgttatatgatctttaagtgcttcatgaccagctttcataatgatgggtccatcagctacaggatctgaaaatggaacaccaatttctataatatctgctccacttttatcaagtaattttacattttctaaaaattgtctattacccatgatgtaaggaataaataatttactcatttttatcctcttttctctgttgtatatattgttgaatcgtttccatatctttatctccgcgtccagatattgtcactactaatatatcgttttgtttcattttaggtgctaatttttctacataacttaatgcatgtgcactttctatagcggggataataccttctattttggtgaagcggacaagtgcttccattgcttcttcatcgctagcacattcataggttactcttccaatatcatgataatatgaatgttcaggtccaatacctggataatctaatcctgctgagatagaatgtgccaattcaatttgtccatgttcatcttggattaaatacatttttgatccatgaagcacaccggcctttcctttccctatcgcaagtgcatgttgattagtatccttacctctgccagctgcctccacaccgtataatttcacatcatcttcgataaaaggataaaatgttcctattgcattagaacctcctcctacacaagcaactactgcatctggcaaacgatgttctttctctaatatttgtgattttatttcttgaccaattacactctgaaaatctctaaccatcgttggaaaaggatccggccctaaagctgatcctaataaataatgtgtatcttccacgtgacttacccaatactgtagcgctttattaactgcgtcagataaagttccttgaccttcatccacagcttcaactttagctcctaataattccattctaaatacattaagttgttgtcttttgatgtcttctcttcccataaaaacaatcagttccatatcaaataatgcagccactgtggcacttgcaactccatgttgtccagctcccgtttctgcaacaagtttatttttgcccattcgtttagcgagcaatgcttgacctatggcattattgattttgtgggcaccagtatgatttaaatcttctctttttaaataaattttagccccacctaatgtttctgtatatgatttcgcataagttaagggtgtttctctcccaacataatcctttaaataatatgctatcttttgttggaatttaggatcattttttgcttttttatacgctctctttaattcaatgatagctggcattaatgtttccggtacatattgtcctccatactcaccaaaaaaacctagttcatttgcttccgtttgtatctgtttcatattctaagctccctttaacgtaatttataattgtttccattttcaatttatccttgcattcatttgtctctataccactggatatatcatagcctttatgtgataaatccagcttttcaatctgttgaatagcacttatatttattcctcctgcaataagataaggaatgtcttggcttactgattctaatattttccaattaaacgtttgaccagtaccaccaaattgaattgaaggggtatcaataataaataaatctacccatggcttatattgattcatatctctattcaagttttctgtagccggcaacgctttaattatcttaatattcttaaaatttaatttaactttttggatgaattcaattgtttcattaccatgaaattgaatgccgttcacattggtttgttgcaacaatgtatttaattctttatatgtaggattcacaacaactataactcgatgaatgtgctttgctacaaattgatttaaatagttaatttgttctatatttaaatgacgtttactttttggataatgaataaaacctatcatatctatgtctaaggaattggcttttaaaatatcactttttgttttaaaaccacaaaattttagtatattcatttctctttatttagttttaatgaaggtaataacgatgatatattattactattcattaaagctcctcccacaagtaatccgtctatgccactacttacaattttttttacatcatttaaagttgtaataccactttcagaaatatagtaataaccttcttttttcatttccaaaatgtcattagtatgttctactttagtaataaatgtttttaaatctctattatttataccaatgattttaggtttaatttgataagcgcgttctaactcttctttgttatgaacttcaactaagacttctaagttttgagatattgcataatgatataaagactgaagtgtatcattggttaaaatatttactattaataaaataatagaagctccggctctcttagcaagatcaatttgaagcggatcaatgataaaatccttacataatactggtaaatgtgtgagttgtgttaacgtttgtagacgttcaaaacttcctccaaaatatttttcatcggttaaaattgaaatagcacttgctccatgattttcatatttagcaatttgatgctctaagttaatgtccttgaatgcttttacagaaggacttttagattttatttctgcaataatactcaatgttgattcccttttcaaagtggtttctagagctgacttataagatacatcaacttttttaatatgttttattttatctgtataatacccatcgtttagtaactgttttttatactgtacaatctcatctaatattgtcaattttattcccctttcatcaactgacattgttttaaagctttgccactatcaattaaatattttgctaaatcaacgccctttttaatactatccactctatttgatatatataaggctaatgctgcattcagcactacgacatttcttttaggggaatgatcttttccacttaatatgtcaatggtaatgtttttattttcttcaggtgtgccaccttgaagttctatattatttgcatgagctatgccataatctcgtgcatttaaaacataatgtgaaatagccccatcttcatgtaattcatatatttcgttatccccagataacgttgcttcatccattctattcgctccatgaagtacgatgcctcttcgtcgtcctaaatctttcatagttttaataatcatgggtaattgggaagcatcgtagacccccattacttgataatctaatttaaaaggattgattaatggtccgacaatattgaaaatagttggttcatgaatacgttttctaataggttgaatgtatttcataattggataagattccatagcgctgataaatgctaaatgtgttttagatacttgtttggctacatttgctactttcgtagtaggaatgtgtaattgttgtaataaatcggtacttccagaattagatgtaatgcttttatttccatgtttaatgactggaacatctgcgcttgctactacaaatgatactgtcgttgaaatattgaaactatttgatttatctcctcctgttccacaaacgcatatacttcctttgtattcaggttgagttgaatacatcgtatgaataagacttttcactatataagttaattctttttgttgtatcgacttatttgtgaaagcttgtaataactttactttatcttgagtatgacattctggattgatgagatattgaataaattcagtagtttcatgttgtgagagtgttgcatgactttgaatttggttgagtaatgttaaggtcatcatatttacctctttcctttacgatatcgataaaatttttaattatttgttgtccttgatctgttgcaaacgactcaggatgatattgaataccaaaatgtaatccattttttgtctcataagattgaatgcaatcttttgtccttccagtaattattaattgtgatggaaaagagatttcatcacttattaatgaatggtaacgcattatattaaattgatttgctaagttgttatataatttagtatgttgaataactgttaatatatcgactttaccgtgcatgactttttcgccttgaataacacggccaccgtaatagcatgttattgcttgtgcacctaaacatacgcctaatatcggtaaagatttatacctttcaataatattcaatagatggttactatctaaaggatgaccaggtcctggagatatgatgagaccatcactttggttaacgtagttaagcacatctttatcgtccggatatttaacaatgacatcatctaattgacttactatatcaactaagttatatgtaaatgaatcataattatcaatgattaaaatcatggtgttacctccaataaactttttgcttttaataatgtttcttctaattctttttctggtactgaatcataaaccaccccacaccctgcttcgactttcacagtagtatcatcaattaacattgttcttattgctaaagcaaaatctaaattctgattacaattaatgtagcctacacccccactatatagtccacgtttatatggatatgtctcatatatacgcctaattgctctaagttttggagctcctgaaacagttcctgtaggtaataaattagcaattactgtcataggagataatttttgcttaatctcaccttttacttcgcttacaatatgcatgacatgctcatatttttcaatttccattaattttgtaatttttgaactaccggttctactgactctatgtagatcatttctgcctaaatcaacaagcattcgatgttcgcttaattccttttcatcactcaataattgctctgcattttgtttatcttcttttatggttttacctcttttaattgttccagcgattggattcgtaataaccgttccatcttgtacagctacaaaactctctggagaactgcctataataatttgtgtattcatattaatatagtacatatatggacttggattacgtctttttaagttttggtataattgataacttaattgcaatgtattatttttaaaatgatgattgtagctatatattctagatggtacaacttgaaacatatcgccttcttttataagctttttcaattgctttatagtatttataaattcatcatctgatacatttggtatgatatttgaaggcgtaggaggacgaatataatcatctgtataagctttaatttgagatagttcctttattctatcttttactcttttttctaaatctttctgttctacttctgaaaattgatttgtagcaataacatataattcatctttataatgatcaaatacatatacatcttctatcatgtgaaattcaatatcattgctatccttaatttcttgtatagattgctgttttaaaattggaaattcatgtcttactaagtcaaaactacacgtaccaataaagccagatacaaatggtaaatgttttaatttttcatctgtaatctgaatattaaattgattgatataatcttttaaatattcataagacttttcagtaatttcaacattttgtttttttgtttttatctttagtaagtcgttatttaacacaacagaaccatagctttcgaatgctacaatagaatatctacctttaatttgcttttgactggtactttctaaaataatcttatttttctttaactttcctaaaacttcgggtgtaatatttgctctaagtatttcataatatagtttcattaagctttaatcctttctcaaaaaaatatcagcatccttatttaaaaggacgctgacgcgcggtaccaccttaattaactaaatatttcgaattatcaaaatatttaaagttcacttattttttatttgattttttataagtataaacccaatttcattattagtgatgttagttttcatcaaccactaactttctatgattatctagctaataattactatatttataccaaaaagacaccacgattacgttccatagataaggacgcgttaccgtggtgccaccttaattaacattacatgttcactttactgttattaaatttaatcttctaagtccaattcaaacatatgctgtgctaatttacatcatccattagctttctatttgctacatcacatatcttctactcaattctcagaattattaaaatattattataattcagtataatacataaataaatcttccttgtcaatatttatttcaatttattgatgacaagcaataggcatataataagttttgagcggcatgtatagaatcaatatgtgttcgttccagtgcatgagaggactcaataccagctccaaataatccatgtttaatatctgctcctgcttttaatgctgcagacgcatctgacgtataataaggataaatatctattttatacggaatatgattaaatttacataagtttactagatgtgtttttaattctttatgataaggtccagacgcatctttagcacaaatagatactgtatattcgtcagaagattgtccctctccaagtgctcccatatcaaaagcaataaattctacaattttattagaaatagatgcattcgctccatatcctatttcctcattattagaaatataaaattgaatagtatgtggtaatttaatttgttcattttttattctttctaataaatctaatatcattgctacacttgctttatcgtctaagtgtcgggatttaataaatccagatgatgttatttctgttcttggatcaaagctaataaaattacctacttctattcctaaatcttctgtctctttcttagaagacgttttttcgtctatacggacttccatatgttcaatatctcttggtattttttcattttcgcgatatacatgaacacttgtttcatgtaaacatattgtccctgtgtacgtttcgccagagtctgtttcaatctgacaatattctccttcaatcgcattatatttaaatccaccaattagatcgattgttaaacgaccatcttctttaatttcttttaccattgcacctaaagtatctacatgagcagtaatacaacgttgacgttcattatcttcaccctcaactgtgataattaatgcacctttatttgttaattgagttgaatatcctaaatgttctactttttgttttacataacttattgcattataagcatttcccgaaggactattaatgttagttaagttttgaattaattctaatatctttgattccattcaacttccccctttaatactttaaatatattttaacctagataaatagtgaactctaatgaatagtattgtttaaaatgaatgactaatttaaaatatagatattctgaatatttagaaataaggagggctcatatgaaaaatattttatttgttggtttaggattaattggtggaagcttagctagtaatttaaaattttatcaatctgatcttataatttctgcctatgatactgatgtaactcaattagataaagcaatgtctattggtataattgacaaaaagattaatgattatgctcttggtgttaaggaagcggatattattatctttgctactccagttcatcaaacagcaatatatctaaattcattacctaattatgaaaccaaatcacatttgattgtaacggatactggcagtacaaaacttatcattcaaaattttgaaaaacgtttattagaatcaaatattcatcttgttagtgggcatccaatggctggtagccataaatctggtgtccttaattctaaaaaacacttatttgaaaatgcatactatattttagtttacgatgatgaacgtaatacacaagcggctaaaacattacaagatttgctctcccctacactagctaaatttattattactaatgcgaaagaacatgattatgtaacggggattgttagtcatgttccacatattattgcctctagtttagtacacttgagttcaagccatgcaaatgatcatgctttagtcaaacagcttgctgctggtggatttagagatattacaagaattgcaagtagtaatgccgaaatgtggaaggatatctcacttagtaataaacaaaatatcattagtttactagaagatatgcaaaccaatattaaggatatgatagttaaacttaaaaatgaagaagaacaacaaatatatcaattctttgaagatgcaaaaatttttagagatcaattacctcttaagcaacatggtgtagtcaattttgggtatgatttatatattgatattccagataaagcgggtatgattaacaaagttacttctatacttagtttacataacatttctataagaaacttaaaaattttagaagttcgtgaggatattttaggtgctttacaagttacctttaaaactccaaaagatcgtgaattaggtattgttgctttaaatgaatttgatacttatattccataaaaatagaagtgggccaaaattcaaaatgacttttgacctacttccgtttatttacatcttatgacctgccattaatcctaatctattatgttttgttccagattcagtataagaaattgcttttgaaacgatgcctttaccatatttcttttgtaacgtatcaatcgttttagctaaattttcatctctttgtcttttatattcatctacaaataaatttaattgtcgattttcttcattaatgaactgtgttagtgaaacacttaacgtacgatacaaagcgtgtttatcacacaactgattcgcataatcattaacgactttaaatatatcttgttctagatttgtagcatcagttaaagtgtgttgtttatgtattcctccaccttgagtatatccaaatgaaaaatgtatagtacgtgctaattgctttctttctcttaatctacaagcaacatcttcaatcaactcttgcatcacaatttttgtttcattaaattgatagtctctcatcaaaatttggcttttacatatagttggattattaattctacttttttctcttattttactttgatctataccgttagcatgtaaatgcatatcagtgcctaatataccaaagtctttcttcaaatatctatgaggataatgggctaaatcacctattgtaataattccttttttatttaactttatttctgtttttttattgattccccaaaatgattttaatggtgaaatacaccataatttatcgggaatgtcatgataccgccactcagtaataccttctttggtgtgtttagcttcgatatccatagctactttactaagtaacaagttagatccaatacctattgtgcagtatattcccgtcttatccaaaatttctttttgaaaacacttagcaaaagaatatactgtagtattaaaaagatggtagctatttgttacatccataaaaaattcatcaatactatactgatgtaaatcttcccctggaacatatttaagagcaattttagaaatttctaatgatacttctagatatcttctcatacttggattaataatataaatatcattacgttgtggaatttcaaataatctagatcccgttttaataccaagttcttttaatttaggtgttgctgccaaaacaacagatccttgtcgcttagtgtcagctaccactgctaattttgtcattaaaggatctaatcctttttctatacaagacacactagcataaaaacttttctgatctacacatagtatgtctctatcttcaagtaaattataatcatacatatcaaccccctccttagataattcaattatataagaacgtttgttcccttacaacattaaaaagaacaaatgttctatttaaatatcttgaagttcattttttaaaaatgatatactaagcacataattatgtaaggaggaaaacatcatgccgattgtaaatgtaaaattattagaaggacgctcagatgagcaattaaaaaacttagtcactgaggttacaaatgcagtagagaaaacaacaggcgcaaatagagaagcaatccatgtagttattgatgaaatgaagaaaaatcactacggtgtagctggcgtaagaaaatcagatcaataatattataatctttgaagtttacataataatattattgtagttaaatagataataaataagcaggccaaagtggcctgcttatttattattcgtctaaaaatgattctattgcttttttatttttctctttatcaatatctaatgcactaccatcgttattagtattaatattttgataagaattttttaacggtacagttagtgtttccacatttttatcgcctcgtattccaaaacttagtcctgtttggaaaatagctgagtttggcatatctgtattaatatatcctctcaatataccagctactttaggtaatttcacgattgtacttggggtaatcaattctttcttaagtgtttgcataacttgttgttgacgtctcacacgtccaaagtctccctctggatcatgtctaaatctcgcataacctaataattctttaccgtttaatcgatggtgtcctttttttaatgaaacccctatattttctgacatatctttttcaacatcaattggcacaccattaggttctaattcatcaatcattttttcaaagccagtgaaatcaatgactgcatagtattcaggattaatacctaaatttttatttagtgtttgtctcaacaactctggtcccccaagtgagtatgcagcattaattttatatttgtcataaccaggaatttccgcataaatatcacgcataattgacatcattttcatttttttcttaatatagtcatactgtacaaccataatagagtcagttcttgattttccaccattagcttggtcagcaccgagcattaatactgtgattttcccgtcatttttaacggctccattaaatttatgaattttaatatcttttgcatgttcttgtgcatatttcataccactttgatatccatgaacgacatacgtaatcattgcaataagtaaaactacaataatcagtattacaaaaggtaattttcgaagttttttcttcttgcgtcgtttagaaggtatcgttgtccccgtttgtcgtcttaatattgtattatccttctcttctgtcatatttacctaccttacactctctaaaatcttcaaaataatattcggatatactataatatataaataagttatataaaatatcttaaaaaatcaagtgttttcaataaatattacaaaggtgttatgaaaggatggcgtaaatgaatattaatacagcatacttcgcaggaggctgtttctggtgtatgacaaaaccgtttgatcaatttgaaggtattgaatcagtaacatcaggttttatgggaggatcagttaaaaatccaacctatgaacaagtaaagagcggaactactggacactatgaaactgttaaaatagagtatgatgttgctttattttcttatcataaattattagaaatatttttttcagtcattgatccattagatgctgggggtcaattccaagatagagggtcacagtatcaaacagctattttttatacaaatgatgatcaaagaaaagttgcgattaactatatcaaagatttagaacaaacgatgcattctgataaagccattgctactaaggttcttcccgcttcaaatttttataaagcagaagaatatcatcaaaatttctataaaaaaaatcctgaacgttacgcacaagaacagcgagatcgcgcaaattatgatcctcgttctaactcataataaaaaagatatccgaaaacaatttcggatatcttttttatttatgtctaatcactcgcattacttttaacatactgtaccagagagaactatcttttctatacaccaaaaatcgcggttcccactggggactatatttttctttatatcttcgtaacccctgaaaacgatataaaccattaaaatgttcaaacacacgtcccgcaatacgttctcgtaaataagaataatcgagttgacctacatttgataaggtagccatacccatgttaaaagctttataccctttttctttaccccataataacatatgtagatataatccatccattagaggtaaatctaattcaggtaaccaacgaattaaatctactgaaattgcttcgttatagtatgtcggcattaatgtacaaaaagcaataatcttaccttcttcatttttcataattccaattggggctttatctaaatactgttctgtaaattgcccaacagaaaaatgcatttcagtacgtccatcgagccacttatcacttacttttctaagctcttctataaacgctttagaaaatggtggttctataatgtcaaatttaatatttaaatcattaaatttattcagtgttgctctaaaaccacgtcgtttttttccagaagtagtaaattgtgttaaatcaataatagcctcttcgcctaatttaaaaaattgatttccaaaattatgatacaacggcataaaacgatcagatacttgatagaaaatgacatcataacctaacttttcagcataactatagaaatcagccaacaatgattggaatgatgccgtatttccaattggatctcccaatacgaccagcgcatttgatttatatctatacataagaaaagcttgttcactgtcatacataaatacatctttatcaccgctatatatcaaatgacttaaataattccctccatatgtttctatgattaatttacattgagaatattcttgtaattgatgtgggcgttcaaagcgacgaccaaataaccatgcaataccaacaattaataatataacaactatcacagttaaccagaaatagtattttaataatgacgtatccatttccaagtgatataaatctaaagcatataaagtttcagaaataatgaaatgattaatatataaaacaatcacactaatgactaaggtaaatattaagttttttaatctaaatggacgtttaaatactttcgcacgtcgataagctaaaataagtaagataaaaataatgatgagccatgtaagtaacatgatagaagcatacgtatataacgttgcaagaaatattaacacaagtgaaatcattgaataaataattgctctcttactttgcttatatataccccttacattaacaagtaatattaaacatgcacttgtatgaatagacaacatgatatagtaaataaaatgatcagcatcatataatccatcataaacaatcgtcacattattaataaagaaaataaaacttgttaatagtgcaagaatagataaagcaaatgctgggatttttgaaataatatctttttgataagacagtatgaatgaggtaacatctttagcgggtacaaaatatttagattcttcaaagtacttacgcgcagaattgccaaattcaaacgtagatagaattaaagcaatgataataggtacaaaataataagcaaaacgatatagcagtaaggcaatcaatattttttcttcaggaatatctaaagattttagtcctaataaaacaactaaatcaaatgccccgaatccacctggaataaaactaatcagtccagagagtgcagcaataataaaaataccaagtaatgttgtaaaagctacatgaatatcaataatccatgccgacaagtaaagtacaacagcagcagctatccattcaatacttgaaacaagcgtgcaatatatccctaccaatttattatgttcagtaaccggtttaacgactgtatacactataaaaataggtaaaaataaagcgactacgtacaatacccattttacaaaacgtactttatcaagaatatgagaagcatcgaaaatatgaagtacgactaaaatagataagaagcttaaaccagttaacattgaaactaatatgattgaaatagcgtgaagtaatctttttctatcagaagtataatttttataaataaatgttctaaatcctgcgcctataaatccaccaaatccaacaatagcattaaatgcattaataatataactcaaacgaaatactttgttcagtggtatactcaactttaaagttttaacaagaatgacatcatataaacttaaaagtagcattgatgcgccaccacatataaataaaccaattaaaaaccatcgattgattttactaaatgcttctaatgtttgtttgaagttaatatatgacaattcatgatataaagtagcaactactacaataaaaagtgtgatagcaaataccacttttaatatagatattaatctatttttatgttcttcagtcattattcattattatcctttacattatattaatataaaatatatcatatcatattctagttatatatctttagactattgaactaacataattgtaagataaaagagagtggaagagaattcatcgtcccacttttgcaagatgattagtactatattaaaaagcctaagacaactcattatgtctcaggctttttaatatagtgctttattctgcttctgtgtaatttttatgttcttcttttttaatttcatattgacctgcatcgtcaccataatatttattgtaacgacgtttaaataataagaaaatgtgagaagctaatacttttaaaatagcatagccaggaatacctaaaataactcctacaatacctaacaaattacccgcacttaataaaataaagataattgttagaggatgaatttttaatgttttccccataatattaggagaaataaaatgaccttcaataaattgaactaacgtccacacaataatcaattttaatagcataaacggtgaagtaataatcgcaataataattgccggagaaattgcaattgttggtcctaagtatgggactacactcgttactgcagcaattgaagctagaactaacccataatccaaaccaataatcgaataaccaataaacaataaaataccaatacaaaatgatacaataatttggccttgaatatatgatccgacctgtacactcattttttctaataaatcatgatagtcttttctaaatttaggtggcataattttagttgtatagtctctaaatttagttccatctttcaacataaagaataatacaaatggtgtagttgcaatcacaacaccgacattcacaatagcttctgcaaatgttctaattttagttccaaatccactaaaataatctgacgttaacgatggaatctttttagaagtagaatcaagccattcctgaatttgattataaaatgaagataaaatagacatatgtgtcactttatcaatagctctattaaatttttcaatatattttgggaagttacttgcaagttgtttaatttgatcaccaatcacaggaattaataaatcgataattaatgttgcgcctccaataatcactaaaaagactattataattgctaataatcttggaatattataacgttccatcaaattaattactggatttaacaaataatacaaaataagcgataaaataattggcgctgcaatagtattaaagataatgacaaaaggctgaaaaacataagaaattttgtcaaagatgaatatagtaataccaagtaatactaatgaaactagcgcaaataataaatctttaccacccaaaaacttcataaagcgtgtttcagaaaagcttagcttattagttttctttccttcatcctttttgtggtccattgacatatcattttcaccgtaccctttaatctaaaataaaataatctatattatatcataccatgtagcttattaattttgtgtgttattttgagattgaaaatgataaatatgcaaagctaaataaacaatttctgaatcatctatatcaatatctagatctttttgaataactttagaaatcttatatgctgtactataacaattagggtaatatgttttgaccatattgataaactcatcttgtgcatgaacgtattcctttttatttaaacgacgaattaggaattgaatatgtctaataaatcgttgatattgaacagttcgaggatttacaggataccctatgtcattttcgataattaatacacatttacttatcattttattaattaaagatatttcactcataggtaaatcttctttatttgaagcaatatgcaatgctataaaacctatttcatcatcaggaaatgtgacgtctaatttctcatttaatcgctgtataacttgtgtggcgatatcatatgcctcactatataaatgtttagtttccattgcaaagggattactaattatttgattttgttttaagcgtttatatgcaaaagtaatatgatcggttaaggcaatgactagttgtttatcatctttcatataagttgtacttgtaatatagttaactgattcaataattgcctgtaagacctcttcatcagctatttcaactagagatttataatattcttgttgttgtttttgatctaatttatacactttctcaatagaagcattatcatctacgaccattccaggctttttattaaaaccaatgcctttaccgattaaaataacttcttgattactattgatgcatatgatgacgttattatttaaaatttttgaaatatgatatttgctcatcattatcatccttttttactattaaaattatatagttaaacattatatttgaaaagtcattcttttaaaaaacacttctttctcgcattactctaagagatggagaaaagaagtgttgatttaaattattaatgttttttagatattttatcttcgcgtccccaagattcaataccaaataaattaatctcaaggttttctggtttaaataccggttttaaaccggcacgtttttgttgaatataatctttcataacagcaaatgcaatatttgaaagacctataatggaaacaaggtttacaatggccattaatcccataaataagtccgctgtactccatacggtttcagttttaacaactgcgcctataaatactaatacaacaactaagcatctaaaaataaataaaattgctttatttttagatagaaattctatattagattgtccgtaatagtaattaccaactacagaagaaaatgcaaatagagtaatcgcgacagttaagaagataccacctggagaaccaagatgttcattcaatgcagattgtgtaacttctacaccttgtggcgctttttcaccaaattttaagcctgagtaaagtaaaatcataatagctgttgctgtacaaacaagcattgtatcgaagaagacacctaaagattgaagtaatccttgttttactggatgtggtacagcagcagtagcagccgcattgggtgctgaacccatacctgcttcgttagagaataagccacgttttataccttgtaaaatcgctgtacctaccgcgccaccagcgacttgttccattccgaacgcacttttaataattgtaccaatcattggaatgatttgatcaaaattcattagtaagataaataaaactataccaacataaacgatagccattattggaacaattaaagatgacaacgttgcaatactacgtacaccaccgaagataatgattgctgtaatgacagccaaaataataccagtaatgattggactaatatgatattgtgttcttaaagattcagcaatagtattcgattgaacagtgttaaatacaaatgcaaatgtaacagtaattaacacagcaaatgtgataccaagccatttttgatttaaacctttggttatgtaataagctggacctcctcggaagccgccttctttatcatgaactttgtaaacttgtgcaagtgttgcttctataaatgcactcgcagctccgataaatgcgataatccacatccaaaaaactgccccaggaccccctaacacaattgctgttgctacaccagcaatatttcctgttccaacacgggaacctgcactaatagcaaatgcttgaaaaggtgaaatacctttctctccatttttcaaagtttctggtttttcaactaatgctctaaacatttcaggtaacattcgtaattgaacaaatttagaactaatagtaaagaagatacctactgtcaatagtaaacctattaaatactgtgaccagattaaatcatttccaacttgaacaacagatttaaaccaatcaggtattaaactatcaaaatctctcaattaaatccctctcatcaaaattattgttatgatatacattacaagagatttatattgtagtattaaaggtcaaaatgtacatgtttttcatgtcatcactttgatatacttatcaacaatataaatctcttgtgagttataaatagttaaatattaaattaattttatcatcttatgaattacttgaaaacaaaaattttaaaatcatattaatttattatcattgattttacatttccaaattcatttgtatcaactacaaatgaaccatttgtatattgttcagaaagatgaatattagaaatttcacctgtttcagcatgtttatctgaataaagtgtatagtatgtttcatctctgacaacatatgcagctacaatacgatgaggattttttttcaattcttttaaaagtgtaatacctctttgtgcgcgtttggcatcttgtaatatatctttagcaatacgttttattgctcctctttgggtagccataattattgaattattctgatcaacagtatcagtcataataacataatcttcatcttttaaattgatagatttcacaccagccgctcttaatcctgtatctgaaagttcttctgtagaatacgttaatgacatgcctttatgtgtaataacagtaatcatttgttcttgagttatgcgaagtacatttaccacttcgtcttcattttttaattttgttgcaatgagtggcttattaaatcgcgtggttttaaataatgattgattactctttttaatcatgccattacgagttgcaataatataaaatgctttaccatcaaatgttttttcgttaaatacatctataattctctcgttttcttctaaaggcacaatttgcgatacatgctgacctaactctttccatcgcacatctgcaattttatgaattggaataaagagatatcttcctttatttgtaaatactaaagctgtatcttgagtatttacagtttggtatttgagtagactatctccctcttttaaacctacttctgtcacaccacttgcattaaagctacgtgtagacgtacgttttatatatccatgtctagtcacacttaaaaccacttcttcacttggtacaataacttctttatcaattttaatttctgatatttccgcttcaattgaagataaacgtgatgttttaaaacgttttcgaatctctgtaagttcttttttaataacatttaataatgcgtcatggttatcaagaatatttcggtacgcttctattaatttttgtaattcttcatgttcttcttcaagtgcaacaatatcagtattagttaaacgatataattgaagcatcacaatggcttctgcttgtgcttcagtaaagtcaaattcttttactaaattatcttttgcatcttttttatttttagaatgacgaatcagcgcaatcacttcatctaatatagataaagctttcataagaccttctacaatatgcatgcgcttttcagcatgatttaagtcgtattttgtacgattagctacaacttcaatttgatgatttaaatagctgtcaataatttcacgtagacccattaattttggacgtccatcactaatagcgaccatattgaaattataagtaatttgtaaatcagaatttttatataaatagtttttaatagactctgaattaacatctttttttaattcaatagcaattcttaaacctgtacgatctgtttcatcacgtacttcaataataccatctacttttttatcagcacgaagctcatcaatacgtttcacaagcgaacttttattcacttcataaggaatttctgtcacaattaattgtttacgtccatttcttaacgcttcttcatctacttttgaacgaacaacaatttttccttttcctgtttcataggctttcttaataccatcaataccttgaataataccgcctgtcggaaaatcaggacctttgatatatttcattaattgatttactgaaatattaggattatcaatatattttaatgttgcttgaattacttcacctaaattatgtggaggaatatcagtagcatatcctgccgaaataccagtcgaaccgtttactagtaaatttggaaatcttgccggtaacaccataggttcaagtgttgtgtcatcatagtttggtataaaggacactgtttccttattaatgtcacgaaccaactcctcagaaagttgacttaacttcgcttctgtataacgcatcgcagcaggtggatcattatcaatactaccattattaccgtgcatttcgattaatacatgacgcaacttccaatcttggcttaaacgtaccattgcatcataaactgaagaatcaccatgtggatgatattgaccaataacatccccaactgttttcgcacttttacggaaatttttatcatacgtattgccactactatacatagcaaataaaattctacgttgtacaggttttaaaccatcacgcacatccggtaacgcacgttcttgaataatatatttactatatcttccaaagcgatcaccaataacatcttcaagtgataggtcttgaattatctcactcaattgacttcctcctcatcatattcttcagtatcaagtatttgaacttctgtattatctaaaatactttgatcttcttgcatgccaaattcaacatgattttcaatccattcacgtcttggtgcaactttatctcccattaatgttgttacacgtttagaagaacgtacttcatcatcgatttggactctaatcaacgttcttgtctcaggattcattgtagtttcccacaattgctcaggattcatttcacctaaacctttatagcgctgtaaaataaagcctttacctaattgtttttgaagtttgtccaattcatcatctgtccaagcatattctacttttttagatttccctttacctttttctaatttgtataacggaggtaatgcaataaaaacacgacctgcttgaacaagaggtctcatatatttgaagaaaaatgttaataataacacttgaatatgggcgccatctgtatcagcatcagtcataataataactctattataattactatcttctaatttaaaatcattaccaacaccagcaccaattgtatgaataattgtattaatttcttcatttttgaaaatatcttcaagttttgctttttcagtattaatcactttacctcgtaaaggtaaaatagcctggaattttctatctcttccaagtttagctgatccccctgctgaatcaccttcgacaagatataattcatttttctcagtattcttactttgagcaggcgttaactttcctgataataatgtatctttacgtttgtttttcttaccagaacgtgcatcctcccgtgccttacgagccgcttctcttgcctgttgcgctttaatagctttcttcacaagtgatttagataattgtcctttttcctctaaataataaggtaatttttcagaaacaacagaatctactgcactacgcgcttctgatgtaccaagcttagatttagtttgtccctcaaattgcagtaattcttctggaatacgtacagaaatcactgctgttaatccttctctaatatcattaccatctaagtttttatctttatctttaagttcattgatacggcgtgcatagtcattaaatacgcgtgtcattgctgttttaaatcctacttcatgagttccgccgtcttttgtacgtacattattaacaaaacttaatatactttcagaatattgatcattatattgaaaagcaacatctacttcgattccatttgcagcacctgtaaacgtcgtaacatcatgcaatacttctttaccttcattgatataacttacaaattctttaataccttcttcgtaatgataaacatcttcacgttcttttccatcacgtagatctttcaatgtaatttttaagttttttaataagaatgcagattcttgtaagcgctcacttaatatatcaaaattaaatgccgttgttgctttaaaaatacttgaatctggtttaaatgtgacttttgtacctgttttcttagtttttcccgctttcactaaaccagaagttggaataccaccatccttaaaagattgcttataaatttgtccatttcgatgaatttcaacttctaaccattcacttaaagcattaactacggaagcaccaacaccatgaagtcctccagaagttttatatccaccttgtccaaatttacctccagcatgtaatacagtaaaaataacttctacagtaggtttaccagacgcatgcataccagttggcatacctctcccattatcttccactgaaatactattatctttattgattgttacatcaatttcattaccataaccatttaaaacttcatcgacggagttatcgacaatttcatatactaaatggtgtaatccacgtttatcagtcgacccaatatacatcccaggacgttttctaactgcctcaagtccttctaatacttgaatcgaatcatctgaataatgatttgtcatttttgttgccaatgcgttcgcctcctacaaacgtacgttcgtttttttaactttacaatagttattcttatataaaacgcattaaaatgcaagtatgagttctataagataaacatttaacttaatatataagacgttttttcaatttttaatcgttgtcaggaatactttgtgataaaatatacctacattatataagggatgtgtaaacaaattatgatgatagttctcatgttgattttaagctatctcattggagctattccaaatggttatgttataggaaaagttttttttaaaaaagatattagagaatttggaagcggtaatactggtgccacaaatagttttagagttttaggaaaaccagctggatttatcgttacttttttagatatatttaaaggattcattactgtatttttcccgttatggtttccagtgcatgcgcagggaccaattagtacattcttcacacatggattaattgtcggtatttttgcaataattggtcacgtttatcctatttatcttaaatttaaaggaggtaaggctgtagccacaagtgccggagttgtgttaggagttaatccaatcttacttttaattttagcagtcatattctttggaattttatatttaacaaagtatgtgtcattatccagtattattgcggcaatcagctgtgtgataggttcattaattattcatgattacatattatttggaatgagtgcttttgtatcaatcattttaatttttagacaccgttctaatattgttagaatttttaaaggtgaagaaccaaaaatcaaatggatgtaaaatgggtgtttcttgcactattagttctattaattaaatatgataaacggttcatgtttaatagtgagaacaatatgttttaattcaaacaatttttgcattataaatatcataattattaatataaaggatggttcttacaatgaaaatcaaattgactgatgaagcagttgaatggtttaaaaatgaattagatttacctgaagagaataaagtcttacaattttatgtgaggtatggtggagaatttcaacttaaacaaggttttagcccagcatttcgtgtggaattgagcaatgatgttgagataggttatcacgaaaattataatgatttaattgttgtagtttcagaagatgacttatggtattttgaagatcatgaagttctagttgaaaaagtagaccatgaagacgaaattgtttattctacaactaattaaaaaaagaccataaatatctaatatttacagatatttatggtcttatatttatatattcaaatcgctacgttgtgtgacttctaattccttaccttcgttattcaatgcttcgacttcactatatacttgatgccattctggaaaataacgatctaaacgaattggtctgaaatcacttgctttaatacataatagctgagtggaacctgtggtagctaattcccctttttcattatatacttcataacagtacgttgaacgcaatcttgaataatgttctacccatgttttcactttaactttttcaggataaaaaatggatttcttatattgaacttgtaaatccacgacgggtgagatgataccttctttttccatatctgcataactaaaacctaatttacgaatataatcagtacgagcaacttcaaaccatgtagcataattcccatgataaattactcccattttatctgtttcttggtatctcgcttcaatttcagtcatactataaatcatatttatgtacctctttccaattaagttcactttcaatattaacataaaaaggatgattgctatagaattcccatttactacttttattactgaaatagctcaatgacacgaatgaagaaaaaatccttagatgagattgccatctaaggattcaaaatacattcaaatttttaaatactttttcgaataattgtattattgagcaagtttatttcttaataccatttgtagaatgccaccgtgacgataatagtcgatttcaacttgtgaatcaaaacgaacaatgacatcaaaatcaaccacttctccattttctttttttgcatgaactttaataatatcatgtggttgtacatcttcgttaatatctacagaaatctcttctctaccatttagaccaagtgaatcagctgattctccatctttaaattgtaatggtaatacacccatcataactaagttagaacgatgaatacgttcataactttgtgctattacagttttaacgcctaataaattagtacctttagcagcccagtcacgtgaagatcccataccataatcattgcctgctaatactgctaagccagtgccatcttctttatatttcattgcagcatcataaattggcataatttcatcagttggccaatatgttgtaaagccaccttctgtacctggtgctaattggtttttaattctaatattcgcaaatgtaccacgcaccataacttcatggttaccacgacgagaaccatatgagttaaaatcacgaataggcacgtcatgatttaataagtatttacctgctggtgtatctttaccaatagcacctgctggagaaatgtggtcagttgtaactgagtcaccaaatttacccattacacgtaaatcttttaatggttcaatggtacctggtttttttgataaaccttggaagaatgttggattttgaatatatgttgaattaggatcgaagtcatataatggagagtcagtaacatcaatctcattccacatttcattgttgttgtatacatttttatattcttctttaaataattcaggtgttacaacactatctactgtatcagcaacttctttaattgaaggccaaatatcatttaagtatacatcttgaccatctttacctttaccaagtggttcattttgtaaatcaatatcaactgtaccagctaaagcatacgcaacgactaattgaggtgaagcaagatagttcgcttttactaatggatggattcgaccttcaaagttacggttaccagataatacagaagtaactagtaaatcttctttagcaatagctttttcaatttctggcaatagcggtccagagttaccaatacaagttgtacatccataacctactagattaaatcctaaatcatcaagatatttttgtaatccagaatcacgtaagtaacctgtcactacttttgaacctggtgctaatgatgttttaacatattcaggcacttttaatcctttttcaactgcttttttcgcaactaaaccagcacctaacataacgtaaggattcgatgtgtttgtacatgaagtaatcgctgcaattgcaatgtctcctgttttcatagttgtttcagaaccatcgttaaattgaatattagctgatttatcaaattcgctttgatccaaaccatgaccttggtttccagcaggagctgttacagatttttcgaattcttttttcatatcacttaagaaaattaaatcttgaggacgtttaggaccagatagtgaagcttcaactgtcgataaatctaaatgaattacatctgtatattgtggatcttctttatctgatgtaaagaacatattgttttgttgtaaataagctttaactaactcaatatgctcttcagagcggccagttaatttcatatatttaagtgactcttcatcaattgggaagaaaccacaagttgcaccatattcaggagccatgttagcaatagtcgctcgatcagctaatggtaaatcggcaacaccaggaccgaagaattctataaatttaccaactacaccttttttacgtagctcttgagttactcgtaatgctaagtcagtggcagttgatccttgaggtaatgaattagttaagcgtactccaatcacttcaggaattgggaaatatgatggttgaccaagcatacctgcttcagcttcaataccaccaacaccccagcctaatacaccaataccatttatcatagtagtatgtgaatctgtaccaacaagtgtatctgggaaagcagtttgttcaccgtccacgtctcttacatgaactaccttagctaaatattctaagttaacttggtgtacgatacctgttgcaggcggtacagcattataattattaaatgcttttgtagcccagtttaaaaattgataacgttcatagtttctttcaaattctaatttcatattgcgttctaacgcacgtgggtttgcatagctatctacttgtacagagtgatcgatgactaaatcaaccggtacttctggattaattttattaatatctccacctacatcattcatagctttacgtaatgaagctaagtcgacaaccgcaggcacccctgtaaaatcttgtaagattacgcgagaaggtttgaaaggtacttctccttcattaccttctttaccaaaatgggctaatgctttaatatgatcatctgtaataacaaagtcatcttcttgtcttaatactgattctagtagaacacgaatagaataaggtaacttactaattttagttaaaccttgttcttcaagactttttaaatcataatatgtatatgatttacctcgaacttcaaatgatttttttgcttgttctttaatgttagaagtcatttgattatcccccttgaatattaaaaattcataattatacttctttaattaaattgtataattatatgttttttaaaacaactatatatcactagaatttgagtgatttgaattttggttttataatcagttaatataagaaatacttatcatcatacatttaaactataagtattttttattaaatgagaatttttttcaataagctaaatgaaataaaaaggaaagtagaatagaaattcattttgaatttttggctccaatatcaatatatattggatgtggattttcttttgaaagtctttatatttcgatctaactatattaaaaaacgcctaagacaaataagttgtcttaggcgttttttttaattattgttctactttctctgcattacgtcgattttgacgtttttctaatatatcagattcatagtctttttgttgatattcaatatattcttttagtctatgtttattaggctgtaatgttaatcctaagaatttgcgttcttggttagcatctttatagaaactaatcatcattagtatgaccacaaaggagaatggtaatgcactaataattgcagcactttgtagtgcgcctaatgcttctgcgccatctccaccacctgctaagagtaagatgaaggcaataagagattgtgcaataccccatgttacttttaccacgttagatggttctaatgagccatatgttgtttgcatacctaatacaaatgttgctgaatcggctgatgtaataaagaatgaaccgattaatataagtgcaacaagtgataaaatcattcctaaaggtaaatgattaaatacgccaaagagttgcgtttctgctgacatcttgaatagctcagaatgttttttacccatttcaatacctaatacgccaaacacactgaaccataagaaacttactagagccggaacaagtaatacacctgaaataaattcacgaattgaacgtcctttagacacacgtgcaataaatacacctacgaatgggctccagcttaaccaccagccccaataatatagtgtccaagaagacatccattctcttttttgagaatttaatgctgctgtatcaaaactgttgaataagaatgtattgaacaaactaccaattgaacttgtaaacatgttcaaaattaatacagtcggtccaacaattaaagcaacaatcattaatattgtacctaaaccaatattagcattacttaaatattgaattcctttacttagaccagaccaagcactaataataaataaaattgtaacaacaacaataataagtgattgaacccatacattatttgggacaccaaataagtaatttaaaccaccgttaatttgtaatgcacccatacctaatgatacagctacccctactactgtagcgaatactgaaagtacatcaataatcgtaccaataggtccttctactttatctccaagcaatgggcgtaatgttctagaaacaagtcctggttcatcttttctaaattgagcgtatgctaaggcaagagctacgacaccataaactgcccaagcatgaaatccccaatggaagaaagtagaacgaagtgattcagtaaaggcttctgtcgtttttggactagcagttggtggtgctgcaaagtgtgacataggttctgctgcaccatagaatactaaaccaatacccatacctgcactaaatagcatggcaaaccatgaaatcgtattaaactctggtttatcatcaggtttgccaagttttaatttcccaattggactgaaaattaaaaagacacagaagaaaacaataatagttgtaagtattaaataataccaaccaagtttatcagtaatccatccacttattgaactagtaattgaatcgaattgttccggtacaattgccccaattagtacaataatcgctacgataatcgcactataaataaataccggcgaaaatttctttcctttcttacttgattcagaagaagaattcataactaatataactcccttcatcttaatattaaatttttcaaaatgaaaaatacacaattaattataaaaataattaattaatttttcggtaaaccactttaatataataacaaacgttttaatcttaatcaaatttcattaatttcaatatttactaatttatttatgttttgtataatatattatataaaaattaaataaataggagatcactatgctaaaagaatttaaagagtttgcatttaaaggaaatgttttagatttagcaattgctgtagttatgggagcagcttttaataaaattgtatcatccttagtaacttatattatcatgccattgattggtaaactgttcggttcggtcgattttgctaaagattggcagatttggggcattaagtatggtcttttcattcagtcaattattgattttattatcgttgcttttgcattatttatctttgttaagattgccaatacaattataagaaaagaagaaccagaagaagaaattgatacaaatacggtattacttacagaaattcgagatcttttaaaaacaaataaataaatcaaaaaacattggaatattaatattccaatgttttttgttacttccatttaaattttgtgtaactttgatactgatttgtatttacttcaagtattaatgggattcgttgttttaactcactcacatgagagataattcctaccatccgtccagatgtttttaaatttaataatgtatcaagagatgtttctaaagtttcttgatcaagtgtgccaaatccttcatcgataaacattgattctaacgttatccctccagattcttgttgtacgacttcacttaatcccaatgctagagccagtgatgcttgaaacgtttctcctcctgataatgaactaatatgtcttgacttattagaatataaatcaaatacatcgatttctaatccactatatccttgtgatattgattctcttcgtttaagttgatatcttcgcccgctcattatatctaatctaatatttgcttgatgtataattctttctaaataatagattaatacatagttttcaagcgataatttttgatgattctttcctgataaaacctcagataaattaaaaatttgttgctgctcttttaactcttcatctaaatagtgaatatgtttttcaatttttgcaaatttttcatcatttttcttaattttatattgtattgatacaacatcattaacatactgattatatttttcttcgatatgttctttttgcatttcaagattagatatatcttcaagttctttttcacttgtaagacgtgttaatcgttctatttcaacgttatatttatgttgttccttatcgaagtgattaattcttttttcaatatgctctatatcttgaagttcatgttttaatttttttatttcatcttcattttctaaacctaatcgtttcatttcttttcggatagttgttgtaaaataatctaattcgttttgtagttctttactcgtagtcaaataattatcaacactatttttttctaaagctagcgcattttgatatgattgcatatttttattagtatcatcaacatgttgatgatactcatcaatctctttttgaagacttaagtaataatttttaaaagtttcaatacttgaatatcctgtgcttatttcaaaatcttgaattaaagtttgattctgacgtttttgagaagctaatttctctaatttaagttcctgctgatgcttctcttgctgtaacgcatgaaattgttgttgtaatttatctaacttttctaattgttgttgtaattgtattttttcagactttgcacattgtaacttttctttgatttggtctaaattaatcgattcatactctatctctcctaaatctgatatgttttgagagagtaattcacacgtcgtttcgcttttacttaaatgctgttttttttcattaatttcatcagaaagtttatcaagtaattgatgattttgattaatagtttcaaaatcaatatgctgatttaaagattcaacttcatttccacatattggacatgtatcgccaatacgtaacgctgactgtatttcaataataaaggtttgtttatcatttaaatcaatattacgtttatcaatgctttctaactgttgattgagtgtatcaatctcattttttaaattttgtatcttttttgaatgttgatgatattgttgttttagagaaacttgcttttcatacttatcttttaaactttgttgttcatctaattgtttttgtaattgatatatttgttcagtcagctcatcaatagctttattatccactttatagctatcaatagattgactcattttatgtcctttattaattaactgctcttgctctttcatcatttcattataattatgaataatatgttcttgctcttcaaatgcttgttgatatttatccaattgatgataaaaaggcttcgattgttctaaattctcactttttaagtggtatgagtcactcatcttgtttaattgtttatgttctttttcaagtatgtttattttattatttatttgcgatattttattctcagtctctattattttggtttttattatttgatacttctcttctttcaaacgttgttgatcatataaattaaatagcatgccagtatcttttaatcgatttaattttacttttaatacttgtatgtcttcaatctgttcatctaattgatgttttaattggtggtattcttctaattcaatcagttgttgttctaaatttttatttaaatcaatgcgttttattatagaatgtaattgttctttttgctcattttttatatgtagtctttgttcttcgagttgatgacctatcgttttgaagttgggaatagcctgcaataattcttgagtttttatatgatggatttgtttcaattgaattaattgctcatcatcaaatgcgtcaatatcttcccatagtaatttaatttgatcgtatcttttttcaatttgttttttctcttctttcatttcatttttgagcaaattttgaatttcctcaaaacgtatactattaaataaagttcttaatatcccctgtttatctgtactattggatactaaaaattttttaaattcaccttgtggaagaataaataactgtctaaattgttcagcattaacgcctagtaatgacttaatatattgatttccagcactgattttactttctcttaattcatatgtttcacttttagaatcatattcatacacatctagttttcctggtgtttgactagtgtttccctctttagtaaaagcaccttgacgaataattttgaaatatttttcattaagttgaaattcatattcaacccacataggagattttgcctctgcaaaatgacttcttaatcccgcttcacttctgccttctgtagaagcttttccaaataacgaaaatacaattgcatcaaatatcatggtttttcccgaaccagttttaccactaattaaaaaaagctgatcatttttaatttgagtaaaatctatcttttcatgtaagaatgggccaaaattatttaacgttaattttattggtttcattttagacctccttattcgataccaaagtgattaaattatttattttttcttcctgatacttggtcatctcattatctgtaatcatcttataaaattgcttaataatagtttggtcgtcttgttgttgtatttgtgtctgatgtaaaggcccctcattttcaaaagtaatattgctaagcgcaagagtattggggaatagttgttttaaatgaatcattggatcactaatatgcgacatatttttaagtttgaaatgtatataattatctttatttttaggttgaatatgtccttgaatcacttcatcatactcgccctcaaccacttcaagctctcttaaaggtttaagttgcacaaatgatgttgatagttcatttttatcttgaaccactaaacgtttatatcccttaggctggtttatttctgaaaatgaatattgtaacagtgaaccagaataatcaataatgtcatctttaatactaaatggatgatgtaaatgtcctaataacactttatcaaatacgttaaaacatgatttagtaacactttcaacagtcccaattgttaaaggtctttctgaatccgatgtttttcctccatttatcgttaagtgaccaattaaaatatttattttctctttattcaaattttctactatataattaatacatttttctgttgcttgttgataagtttgaatagaagcatctttaaaaaattcttttacttcactaatagtagcaaatggaagtacatagaaatgtacatcattaaattcgataggttgattcatatgttttaattttgtacgaataaagagtttggaatgttcaaaccatgaagctccataattcaatcgttctttaccatcgtgattaccattagaaataatcatagggatattcatatctatattaatagtatgaatagcattttcaaaaagatgaatagtttctttacttggataagttgtatcataaatatccccagcaatcacaactacatcaggtttctcatcttttaaacattggataaattgttctaaaataaatgattggtcttcaagaaattgttttccgttaagtatctttcctaaatgccaatctccagtatgtataattttcataacattccccttactttttaaagcattatactttacttttaaaaaagagcgagattgaattctcaatgaactcacatactcgctctaaacttcaattcaatttaatatcaaaaaataatattttatttaattttagataagctaataatattaatctctattatgagactaaagattttttaacatttttatatttatataacatagctaaacgccaaggaacaatcatactaaatgccaataaaaagaacatgcctccgatttctcctggatcaatagagctactaataaatatttttatgattgttctaataattaaaagtgaaattaaaatgattggaaacgcttttgatcgtttcatatatacctcagcgccttgaacttcaaaatgacttgtccagataagtacagatgaaaatatcacacctaaaatgatagattctaaaatttcagccccagttaatctaaaatatggaataacatacatcaaagcccctgtcgacataaagataggaggtaaaataattttcttttcatttacagggaacttttgtgctttcatacgaataactatgacaacaatccccataaacaatgcaaatactatggaaaaaactaaatatgccaaatttacaccttcttatactcacataactaaaagtttaatactattatacttcttaaatactccaactaaaaatgttttacaacaaaaacaaaggattgtaaacccttatggcatacaatcctttaataactattatttttttgaactcttcatgttttgatccatgtttttgttcatcatcgtcatcatttgattgattttcttttgagacggtttttgtcccatttgcatcatcatcatacgtaacatttcttcattgataggtgggttttttttcaaatagtccatcatatattttcttgctaagaagaaaccaccaactagtccgatgataagtgctacaatgattaataaaattgctaaccaagttgccattgtttcacccactttctatatcctactgaattttactaaataactaccttgatttcaagagttagttttagaataacacctcttcgcttttatattaacaaactgtttaacacgaatactaatatttataaataacttcatataaagtgctatgcacaaaataaaaaagagcaagaaagaactcattttgaattcattccccgctctctctatgttgactaaatcataatattaaaaagtgcgaatttgatttaaaatattttctttagtaaagccatatttttcgacaactaagtctcctggtgcacttgcaccaaaaccatcgattccaattactttaccttcagtgcctacatatttatgccaaccgagtggtgaagccatttcaattgcaacacgtttagttaattcttttggaataactgattctttatactcgtctgtttgttgctcaaaagcgaaccagtttggcatagaaacgactcttacacctttaccttgtttatctaaatctttagctacttcaatagctaagcttacttctgagccagttgctagtaatagatattcaggtttagtttcagtttcaaatacaacatatgcaccttttcgtacgccttcttcaaccgtttcttcatctacatctaaataaggaagattttgacgagttaaaactagagatgttggtgtttgtttagattctaatgcaacttcccatgctactcttgtttcattaccgtctgctggacgaatgacgttcatatttggaatagctcttaaacctgctaactgttcaatcggttcgtgtgttggaccatcttcacctacagcaattgaatcatgtgtaaagataaatgttgcattcaatcccataattgcagataagcgtaatgctggttttaagtaatcactaaatacgaagaatgtagcaccataaggatgtaaacctccatgtgctgccataccgtttactgcagcacccatagcaaattctcttacaccaaaccaaacatttttaccttctggagtattaggattgtaatctgtagcttctttaacatttgatttattagatcctgctaaatctgcagaaccaccaaagaatgaaggaacagatttactaattgcttgaatgatttctccagaatctgcacgagtagctgcattatgatcactactgaattttggtaattcatctttataattttcaggtaatttaccactgattgccaatttaaattcttcagctaactctggatatttttctgtatatgtttctaatttttctttccactcatcttcatgctcatttgcacgttttagcattgttgtttggaagatttcatatacttcttctggaacattgaaacgtttttctggatctaatccatatgcttcaaatgtaagttttctttcatcagtaccaagtggcgctccgtgaacaccatttgtaccgctaacgtttggcgcgccgtaaccaataattgttttaacttcaattaacgtaggaccattttgctgtttagctttagtaatcgcattatcaatttcttctaaattgttgccatcttttactaaaatatggttccatccataactttcaaaacgttgttttacatcttctgagaaagatttgttaagttcaccatcaagtgaaatatcatttgaatcgtataatacaataagtttatctaattgattatgaccagcaaatgaagctgcttcatgagaaataccttccattaaatctccatctgaagccaacacgtaagtataatgatctacaacgttaatatcatctttattaaatttaccacctaaatgcgcttcagctaaagccattcccacagacatagcaaatccttgtcctaatggacctgttgtaacttcaacaccatctgtatgacgaaactcaggatgtccaggtgttttagaaccccattgtctgaactgctttaattcttctaattctaagcttccagagacatgtaataaactatatagtaaagcagaaccatgacctgcagataatataaatctatctctgttaaagtagtctttagattgtggattaaagtttaagtggcgagtccaaagcgtgtaggccattggtgcagctcccataggcagaccaggatgaccagaatttgcttcttcaattgcatcaatacttaatgcacgtatagtatcaatagctaattggtctttttcattaaacatcttacatacttcccttctagaattaatcatcttttttatattataacttaaaaatatagtaaatgataagattataatgttaatgattaaaatgttattaactattgatcattctttttactttcttgaatttttttaagtttttccggcgttacatcgttaccttctggatcaatgactttggtactttcaatttgttgtttaaatccttctctaaaagaatctaaatattgtttacgcaacttagattgctcttttgcttcagcttctgttaaaccttgctcttttttcttttttgctaattcattaattctatctatatttaaattattatttgacatgtcatcacacttcctattcttttctttaatacatataaaatacttaattaatataacaaaaagagacatagataaaaaatctaagcatcataaactctttctaaaataaatgaagtatttttatataatacttcatattcccatttcttagaagtaataactttttatctatatctcttaaatatttatttaactaaggcgaacactttatagtctgtttgttctgtattatcgggtatatcgttcttataatcatcgtttaaaatcgcttttttagggatcgtatgatcggtaatttcgtacatgtgttccgtatgagcgttctgatataagttagtaaaaaacaccagaaaaacgatgcaagatactattagaacaattatatttttaatgatattactagtataattactaagcatttattttcactcctagaacatttgtttgtataaatactttaacagaacgagtgttcctagtcaatagtattacgaacaaatgtttgtttaaaaaatcaaaaaatgctatactatattaaaataaacttagggagtgcctatatatgagagagttaactaaaagacaaagtgagatttatgattatattaaacatgttgttcaaataaaaggttatccaccaagtgtaagagagattggtgaagctgttggtcttgcttcaagttcaactgtgcatggtcatttatctagattagaagaaaaaggatatattagaagagatcctactaaacctagagcaattgaaatcgtgagtgatcaacataatgatatgactagagaagaaactatctatgttcctgttatcggtaaagttacagctggagttccaattacagcagtagagaatatagaagaatactttccattaccagaacatttaacatccacacacaatagtgatgtgtttattttaaatgttatcggtgaaagtatgattgaagcgggtattttagacggagataaagtaattgtaagaagccaaactattgctgaaaatggagatattatcgtagcaatgactgaagatgatgaagctactgtaaaacgtttttttaaagaaaaaaatcgatatcgtttacaaccagaaaatagtgctatgagtcctatttacttagataatgtaacagttatcggtaaagttattggtctttatagagaattgtagtttatctcttgtttgttacgttaaaatctcttatatatatgtttaatatacaaaaaactagaagtgcctaagcacttctagttttattttttatttaaaatctctttaactttatcaagtatatcttttttcttatttttctttgtaggcataatatcaacttccttgcaaaaagaacatacccctatatattataaatcaaacattatccagcatagttttctgtccaaaatggttgtcgcttattattaaaatctacacctacacctaatgtattaacgtgtgtatttaaaatattttcccgatgtcctagagaattcataagtccttcgtgagcataaatactactttgttgaccataagctaaattttcagcagcagcattaaattgtataccatcacgtttcattctatcgaaaggtgaatgaccatttaaatcagtatgctcaaaataattatttttaaccatatcttcactatgttttcttgcagtattagatatttttttagagtaatccaatgtatttaatccgtgttgttttctttctgcattaactaaatcaaagttttgatattcaaagcttttttctagcgttgtagaaggtgcaccatattgcttttgtaatcggttttccatcgattcactcacttgcaacaaccctgttaagttatttttattatgtttatcgtaaaatgcagttgtataaatgtgatctttataaaaaacatcatattcatcattttttacaacaaaacgattacgtccttttgcaattttatctactggcttaccaagacgttgttcaaccacttttttaggggtattatatttaattttagatttagaagttataatgttttgattactaaataaagcattaactttattattaatataacttaccattaaaaaattttgataatcatcattataataagtgtaccattttgtcccatattcatttgaagtcactctttttggtcgccctatcttattttctacttccttttgtgacatatttaattgaatattattaactgcgaattcttgtttttttggaactttaagcacattatttttatagcttgtatcttcatttaataaaacttctactttatctcttacattattttgcaaatgaataaaaaactggttttcttcgatgggttttataatgataaataacagaaatattgcagtaaataaaaggaattttttaataacattcacctactaaatatatattaatctctatcaccattaaaaattgagtttcttacaataacatagtcaacagtagttagtgattttaaatctttgccgccagcataggaaattgaactttgaagatcttgttgcatttcaactaaggtatcttttaatgaacctttatgttccacaaacattttcttcccttcaacattcttatgttctcctttttggaattcggaagcactaccaaaatattctttataacgtttaccatctaactcaactgttttgccaggagattcttcatgcgctgcaaataatgaaccaatcataaccatagtggctccaaaacgaatagatttcgcgatatcaccatgtgttctaatacctccatcagcaataattggtttacgtgcagctttactacaaatgtttaatgcagctaattgccatcctcctgtaccaaatccagttttaattttagtaatacacactcgtcctggtcctataccaactttagtagcatctgcaccagcattttctaattctcttactccctcaggcgttcctacattaccagcaataacaaatgattgaggaatatgttttttaatatgtttaatcatattaataaccgaattagcatgaccatgggcgatatcaattgtaatatattcaggtattaaatgctcagtttttaatttttctataaattcaaattcagtttcctttacacccactgaaatagaagcgaaaagtcctttattttgcattttttttataaaaggtatgcgacctgcttcatcaaaacgatgcataatataaaaataatcattttctgcaaaccattcagctaaagattcattcataactgtttgcatattagcaggaaccactggcaacttaaaagttttaggtccaaattgtacagttgtatcacattcagatctactattaacaatacatttatttggaattaattgaatatcttcataatcaaaaattttcatactttaaatttcccctatacattaaaaattaaaaagacactgtagacataaataaaatatctgacgctttaaaaaatcatttataacgtaatctagagcgagaaatcaccttttcctcgctcttattatttatatccttatatactttacaattttttaaatacaatgtaaatggactaaagtattagtttcagttaccaactagattttttcacaccaggaatttgacctttatgagcatgttctcgaaatgcaattctagacatttcaaattttctcattgcacctcttgggcgtcctgtaactttgcatcttcttgttaaacgagttggagatgaatctcttggcaatttttttaatgctttataatctcctttttctttcagttctttacgtaattcataatattgatttactaatttttctctttttaattctttagctattttagattttttagccatataatatctcctttttacaaatcgtaataattacgttttatatcttaacatacttttaaaaaattacaaagacaattattttaaaattaaaagactcacacatgttattcatcttaaacatgtatgagtctataatagtttatctttttgtcgtatttaaaagataaggaattatttagtttcacggtgtagcgtgtatttatttaatcttgggcaatattttttcatttcaatacgctcagggttattacgtttattttttgttgtaatataattacgatcgccacattcagtgcaagctaaagttacattaacgcgcatcaataacatcctttcttgttatatataattaggaattcttacgatttaaaattctatcatatcctttatttttacgcaataagtttcttttaatttaatcagtttccttctacgtaccaaaaactaatcgttttaaaaaatcagaaaatttaaaatttttaaaacaaattgttcaaaagttattgaatacttgacctaaaacgattaaaatgatttgtatattttaaattttaatttaggagatattatatggaagataacaatatgaaacgcggtcttaagtcaagacacatatctatgattgctatcggaggcgcaataggtactggactttttgttgctacaggtagtgtcgtttctcaggcaggacctggaggagctatcttagcttatttattgataggaatcatgctttattttttaatgtcgtctattggagaacttgctacattttatcctgtatctggttcgtttagttcatatgctacccgtttcattgatccgtctatcggttttacaatgggatggttgtattacattctatggtctttagtatcaagcgttgatgtaatggtagcttctaatgttttattttattgggatgtatttaaaattttcagtcctctggtatggagtttaatttttataacgattatattcctattaaatatctttactgttaaagcatttggcgaaacagagttttggttatcattaattaaagtaatcacaattattgtatttattgttgttggtatattaatgatttttggtattcttggtggacatacatatggattcgagaattataccaaaggtgaagcaccttttgtaggtggtttatctggtttcttagcagtattacttgtagcaggattttctgtgggtggtacggaagttgtagctgtcactgcaggtgaatctgataatcctgaaaaaactatgccaagggctgttaagcaagtattttggagaattttattgttttatgttttatctattgtcgtcattgcagctattattccttatactgatcctttattattaaataaaaatcaatcggtatctcaaagtccatttactatagttttcgatcgaatcggtatagcatttgcagcatcaattattaatgctgtcattcttacatcgttactatctgcagcgaattctggaatgtatacaacaagtagaatgcttttctctttgagtgatgaaaagcaagcaccaaagtttttaagtaaattaaataataaaacgaaattaccgatgcgttcaatagtcactacttacattttagtagtagcaattattattctagctaatttctatgctaatgcagtatttagcttgttaaatatcattggctctttagtaattattgtatgggcaataagtgcatgggctcaaatacgtttacgtagagggattaaacgtcaaggcaaaaatattaacacattattgccttacaaatcaccacttttccctctaggccctatcattgtgtttgctacattaattttcttataccttggtaattctatcggtgatttatttaatggtaatataggcgatttttttgttaatatcatgcctttaattgtcttagcaattatctttatcgtgcataaattgattcgtaaaactaaatttgtaaaattagatcacatggatcttacaacccatcattatcatgattaatatcatcgtttatttaggagtagaattaaatacaattctactcccgtttttattcctaaacacaatatgtatattttctaatagtcgtttattttgtataatgagtataacgataacgacttagaggtgactgagtatggtaggtcaaacaaatttatttgatgacgtaataaagagtgatgaacgttttgttattgtcgtacaatctttagaagaaagaaatggacaattactgaaacgtacattgcgtgagtatcctagtctaactcatgatcaaatggaaaacttatttacacacttaaaagatgtatttcgagatgagccatttcacgttaaccaatctgcatatacaataacagtatatacaaatttagattatgcagctgatcaagtatatgctcatgtaaaaagaaataaaggtaaacatgactggacacatactgctaaataattagttatgataataaaaaagaggaagcgaaacatgattcaatacgaattcattccgcttcctttttaatttatataaatgttttatagcaattctttaagcgctactggtataccattagaatcattatctaatgtaactttatctgcaattttttttaattcttcactcgcatttcccattgctacagcatatcctacaactttaaacattgattggtcattgaggctatctccaaaacaaatcacttctgataatgaaatatttaacttttcgcataaagctttaattgcattacctttagaaacatctttagccatgaattccaggaagaaaggtttgctcgtcgtcacatcaatatcagaattaaatgttccatttaattcgttacgtgcttttgaaatattttcttcataatcaacgcccattgttttaggtacatcagactgaatatacgctttaatatcatccacttgtttcataggtagaccagttaattctgattcaattttacgatattcatgttctgtatcaaagataatttgtccgtcttgatacgttaatgttaaaaagccttttttgcgacaatagtctgtaattttatcaaaatgatctttagttacacttttacttacttcaatttcttctgttttagcgttaattgttttaccgccattataactaatgatatagctttgataatgatctaactttaattctttagctactggaatcattccttcagttggtcttccagaagctaaaacaattttatatccttcttcttgtagttgaattaaatagtctttggtttcaggactaactacattatcacttgtcattaaagtgtcatccatatccataacaatcattttatagttactcatttcttagttgctctcctttcatttttgctcttatctattttacaataattttatgaaggatacacaacttcttcaataacacctacattattaattgttgcatgttcagaatcgcaagttgttatttctgattttaatgttctaacaagttctccacttttttctttacgactcaatgtcaatatcgttggacctgctccactaatcactgtagcataagcatcatatttttgggatagtacttttactttttcaaattcaggaatcaagtgttgacgataaggttcatgaaaaccatcttgtgtcatcatttttccggcaaggtcataattatgttgaattaatgcacaaatcattgtattgctaatcgcactattttgaactgccttctcatgagaataattatctggaagtaccctacgtgagtcttctgttttgagttcatatgttgggatagtaagaattacatctacatcaggtatatcaatatgtgccacatttgtctctttggtttcaggattataatatcctgcgagtaatccaccataaattgtaggtgctacattatcagggtgcccttctatttcagtagctagttgtagtaattcatacttagataattgaatattaccgaagtagttagcgatatataatgctccaactaaagcggatgcagatgatcctaaccctcttgctaatggaatttcacttctcatcgacacttttaaattaggtaaagttacattatatttttcagctacttgttgtgcaactttatagacataattacttttatctttcggtaatgagtctaactcttcatttaaatatttaaattcccagttactgccttccgcttcctcaacatataggtataaatatttattaattgccataccaatagaatcaaatcctactcctaagttagcagttgatgcaggtattttcaggtgaagtgatggcttcatattaaagtgttcctttaatataattgataatactttctttattgtttggaagcggttgaattggattatctaaaattgagatagcagtgtctggatcttttaatccattaccagttaatattgctactacttttttacctttcggcaattttcctgcacgttgtaatttgattaaaccagcaattgaagcattacttgctggttcactaaatacgccttctttagatgtcattaattgatatgcttctaaaatttcatcatcagtcacactatcaatgaggccattcgattcttctaacgcaacagttgcttttttccaacttgctggattaccgatacggattgctgtagcgattgtttcaggatttttaatgactttattttgaacaattggtgaggctccttctgcttggaaaccaaataattgaggaagttgacttccttttttctcatgatactctttaaagcctttccaataagcagtaatgtttcctgcgtttcctactgggattgctagaacatctggagcttcttctaattgttcgacaatttcaaatgcacctgttttttgtccttctattctaaatggattaacagaatttactaattcaatatcatcatcattttgtgcaatctctttaacgatttctaatgcttcatcgaagttaccttcaattgagacaatttctgcaccatacatgaccgcttgcgaaagtttacctaaagcaatctttccttcgggaatcactacaattgcttttaaacctgcacgtgcagcataagctgctgctgaggcagaggtgtttcctgttgaagcacaaatcaccacttttttaccttgttctttcgcttttgttacagccattaccattcctctatctttaaaagaaccggttggattagcaccctcatatttaacatataaatcaatatctagcatttctgatatattagcacagtgaatcagtggtgtatgtccttcatttaaagtaagtttaggtgtatcttcattcaccggtaaataatctttaaattcttctactaaaccttgccatcttttcataattattaaactccttcaactggataaattttttcaatgttgtaatttgctttactaagtagtgattcaggtgattggtctaatccgataaccacaactccataagaactagaatcacgttgttctatttgaagtgatttgtggaatggtaaatctgatttaagttgatctttaagtttatcaattgattcatcactatgaatgacaacatagtaatttaatttttctccaatagcaattgcgtcaccattatccattaattctcgagttttatttgtttttaattcgaaatgaggtggaagtgtatgtaaatttgattcaaagaagagtgctacatttaataaatcactcactactgcactaccagtagctaagctacctgctcctttaccataaaacattgtatcccctacagcatctccaataacgtaaattgcattgtattcattttctactgctgcaagctgatgtgatttatgtattaaggttggttcaacggatgcattaacttctctatgatgatatgtacttttaccaatcaatttaatcttataacctaatttgtcagctacattaatatcagataatgttgttttactgataccttttactttcacatcatttaacttaattacttggttaaatgataaataagacgtaatcactacttttctagctgcatcaataccttctacatcatcagtaggatctgcttcagcaaatcctaatctttgtgcttcagcaagtgcatcttcaaatgaagtttgttctctcgtcatttttgaaagaataaaatttgacgtaccatttaaaattcccataaatttagagatattattagcatttaacccattattaatcgcgttaacaatgggaataccacctgcaacacttgcttcaaattttaaggctacgccttgttgttctgctagattctctagtaattctaaatgcacagcaagtagatctttgtttgctgtaatgacatgtttttttctttttaaagattctcttaaccaatcaacagttggttcaattcctcccattacttctataacgatatcaatatcatcatcgtttaaaatttcattaatgtcttctgttaaatgatattgactaatattaataggtctttttttagtggtatctcttactaaaatatgtttaataacaatatctttatttagagtatctttaatttgttgtcgattttcttcaataatttttactacacctgagcctactgttcctaaccctagtaacgcgacgtttaattccttcataatttttatcttcctcccatttgtattattgagaagtacaattgttttattgaaaaacacttaaatttattatactattaaatcaaattaattgaataggacttttaaaagaaaaagtgaatatgtagatatatattatcatgtagtatcaggaaattaaatagaattttctgattttttagaaaggttggtaaattttatgaaagttgctaagtttggtggaagttcagtttcaaatgcaacacaaattaaaaaagtcctaaatattgtcaatgatgacccagacagaaaaattattattgtatctgcacctggtaaaagacataagaatgatgttaaaacgactgacttacttattcgtttatatgaaaaagtaatcaatcaattggattatcaagataaaaaaagagagattattcaacgttatgcagatattttagaagaattacatatggagtctacactcttagaaacaatagatgaaacacttgaaacaatcattaaacaattaaacgataagcatgatcgtttatacgatgcattgttatcatgtggtgagaattttaatgctcaacttatcgctaaatacaacgattcacaaggcattaaaacaacatatctctcaccaaaagatgctggtatcttagtaactgacttaccacaacaagcacaaattttagaagacgcttatgataaaatttataaattaagagaaattgaaggaaaaattattatcccaggtttctttggtgtttctaaacataactatgttgttacatttccgagaggcggttcggatatcacaggtgcaatcatagcgcgtgggattaaagcatcattatatgagaattttacagatgtctctggtatttttaaggcaaatccaaatgtaattaaaaatcctgaacttattgaagaaattacatatagagaaatgcgtgagttatcatatgccggctttagtgtatttcacgatgaagcattacagcctttatataaacatagaatacccgtagtcattaaaaacacaaatcatccagaggacaaaggaacctttattcgccatgatcgtgaagttacagataaaaatcaaattattggcattagttgcgataaagatttcacagttataaatattaagaaatacttaatgaatagacaaattggttttacaagaagaattttagaaatattagaagactatcatatctctttcgatcatatgccatcaggtattgataatattagtattataatgcgttctaatcaaattaaaaacatagagaatgaagtattgagtgcgattagaaaaaaatgtgatattgatgaattaagcattgaccatgaccttgccatcttaatgattgtcggtgaaggaatgactcaatctgtcggaactgctaacaaaatcacacatgctctagcagaatcaaatatcaacctaaaaatgattaatcagggtgcttctgaaatttctatgatgtttggtatttcaagagaaaatgcagataaagctgtgttatcaacttatgagtattgctatcatggtgtatgcttaaaaaatttatgtcctaaataacaattacataaaaaaatctgagacatctattttgtctcagattttttatattaaactttttgtgtaagtgcttttttaattttatgctctcccactaccatttttaaaatcacaaattgataatagcttagagcatctaaaactgacttataattggcttctgaattgttttgttgataatctagtaaatcatacattaatacgatttcaggtttgatataatcgacatcccaggttaatgaatgaaaataaatattatttttagataatcggatattactgtttagtctaaatatccattcctcatttataacatcataaataaaaatacttaaaataactttatcattattaacaacgtttatatgagaaatagatggaatatctaaattatctttatccatgttatgattggacgtatcataatatttaaatgtataacttgaaggaataacttttaaaacctctactattcgttttctttctacacaaatatcgactttcgaaggtaattcaaaaagttcatttaaaaatagttgaatagcaacttcaccgtgaaatttgaatgctgtacggcattgattttttaatattccaactagttcttctacatgattttggtaatgagacatacaactgtcctccttaaaggaaacgctttcataagttaattatacagacacaatttaatgttttcaatttttaatttgtgaaaaatttgtaaatcttctaactcttctttagggtatgagatataattttacacaattttatatttataataatgaataaattatatcctgttattatattctttttcaacttaaattatcattttttgtttattgaacaataaatatattttgtttataattaattattgatttctatagaaaattaatttaatcattaatcttctaatttacaaatattaaacaggaggtgagcttatgacacatacgattattctaattattattattgttattcttatacttgcatttgtactcaatcaaagatacatgcaagatagaatagatactgaagtttacgctaaaaatcaaatggtctctaaaaattctttactcagtaaagaaaatttagaacttaaaaataaaatattaagttctaataacgagattagtcctcattccaaacgtaatgctaaacgtgaattacaagatatcttagaccgttttaaagcttcaggaaaattaaaatattataatattattacgactagtaatttagctactaaacatccactgtttgagtatgcaagaacatttgactatatagttgtgtctgacgtaggtcttattaatattgacgttaaaagttggaaacaaaaaacattttatcattttgatttacctacttctgatcacttagagggtgataatcaaagtgtagaacaaattgtagggcattatattagtaaacaatatcatagtcaatttgattcaaatcgtaatgaaatatatacttttattgaaaaaattcaaaacaatcgagttatctatgagttttatcaacatgacccttatgaacaagccgctattaacgcaaaaatcttaaaagatggcattgaaaaatattttaatcataaagttcaaagtattggtgtcatttattttagtgatggtagtgttaatataattgaaggtgctgaagaaagagagaaatatattgatacagtatccactaaatcttctttagaatctgttattaataatgctattgaattatctaaacaccctctatctgaaactcaagttaatactattgttgaaaactttcataactaaaaaatgagtatgggagaacattcgtcaagaatgttctcccatactcattttttaactccaaagattcactttatcttttttagcttgctgttcatctttttcaaatgtacttctatatttaccattaggtgagaagtatttttcacgagctaatccttttttaactaattcttcgttatacattgttttttcatctaaccatacataggctaatgtacgaccataacggtcttctttttccttatcatattctaagtacacatctttattatttaaatgttgtttgctgtaattagaagcttctttcccataaggttgaactggtgtgttaggtttaaccgtttctggtgtatcaacaccaattaaacgtaccttaatttgctcaccatttgatttcttagccgcaaatgtatctccatctacaacccgatcaacgtggactttctcttttcctttaagttctgtctgtgttgaattagatgaagaatgttgactatcgtctttaaatggccctgtatgatttaaaaattgaaatgctaatacgccaataacaatgatagcaagaacaattattgttaaatttttctttgaattcataggtgcctcctatattatatttttaatactcaaatataatatataatatgtatttaataatcaatcaatactttcgacctaaaaagtctacctatattgaatttattttcaaaaaatgattaattgatattcaacatgatataattatacatgttaggagtgaaatacatgagcgaacgtaatgaaaatttagtcacgatgattgctgtcgtaattgctattatcgttggcgttattttacaaatcgtttataaactgcctattattgtttcggttgttatagcagtattgttaggcattttagttggatttattgtttatattattcaaagtattatacgtaaacgaaaaggtaaataagggagtatcatacaatgtcactctcaataaaagattgaattgaaaacattaaatattattcaattcagtcttttttatacattccttaaatatttttcttactttttatatccagcctttttcctttgctttcttccaagcattaaatcgattctctgcatttaatttatcaattatattagacgtataatttctcactgtcccatctgaaagataaagtttttctgcaatgtctttactacttaaattatctccaatttcacgtaataccacttgttctttatatgttaagggattagattctttgaataaagtagtcattaatgaagtactatattccttttcaccattcatgacatgtttaatagtttgtattaaatcttctacggaacgttcttttaatacataagcatctacttcatttgccacagctttttcaaaataacctggtcttttaaatgtagttacaattattactttagtatcaattttaaattctcttattttagataatacttctaaacctgttagccctggcatttcgatatctaaaattgcaatatctggatgatatttttcaataaactcaaatgcgtcacccccattattacaatcattaactactttcatttgctcgttaaattcaatcagttgaaccatcgcttttctcaacatatattgatcttcagctattataatgctaatcatttaatatcctctcttggtatcataatacgtatatgcataccatttttagatttaatttctaattttcctttaagaagttgaactctattttctatactttttaatttaaagtcttcagtggtgttacaaccttttccattatcttgaataattaggtatagattattatcttcttgtatcatttcacaataaatcttactagcctttgcatgtttaatgacattattgattgcttctctcaaaatcattgatagtatcgattgctttgttggagttaaaacatttacctttcttatattttttaattcaaattgaatgtttgcatcttttaaaacattttttatggattgaacttcctcttcaaaactttgagattttaaattttcaataatatttcttaccttaattaaggtatctttagatatctgattaatcgccaatatttcatttttagctttttcttgatctttatcaatcaacttatatgccaattctgattttaaactaagacttacaaatacatgacctagtgtatcatgtaaatcttgccctatacgttgacgttcttgttctgcaattaatgtattaatatacttatttttctcttctatttcattttttaatgctccatcttttttagttttaaaatttcctaaagtaataattaaaataactaaataaaagataactaatacagttatatattgtatttgataaatacttgtaattataagacataaaaatattgcaattataaatgtgataaattcttttgacttaattgttacttcaaacataaaaggtaatgcaaatgcgctaaagaaaaagaataagctattcattggattaattgcataaacaaaatatataattcctacataatgaaccactaataggctatatattacgttattgttaaatcgataataatatattactaacataagatatgacacaataaaaatagctaaaacaattaaatatacagtttgagaacctcgtttttcattaaagatacttataattggaaataacaaatatataagtgttgatagctctcctaatctaacgttccattttctttttttcatctaactcacttcttttctgtgattgatccacactgtaataattaaaaatagtatactatatacaattaaaataaataatgaagtaatatttaaaccttgatttttagctaactctaatgcaaaatttttcaaatgatatgttggagtaatatttgaaattctttgtaaccaactcggaaatgtttgaattggaaaccacaatcctcctaatatcgctaataccatattaactatattggctatactacttgctttttgtgtttcattaaattgagcaatgattagtcctaatgttaaaaataaacttgcacctacccataatgaaacacctgaaaacaaccattgttgtatactcatatttacgtgtttatatagatgagcaacagtaaaaatcaaaataatagccaataaaaataacaatattgtttttatcattttagtagtaaaataggttttactagataaaggcgttaccattaatcgtttaaaccaacctgtgtttctttcttcaataatctctataggaaattgcattaaacaaaaactcatcaagctaaatactgtcatactatacatatattctttatagaactgctgtttcgcctcttctggtaagtctagtaaagaagtaaataataaataaaaacctaccagtaatatgattgataagaatgttgttagtttctttcgaaaaataattttaaattctgtttttaataaagcgatattattcatttttagtccctccctcttttacatcagcaaataaaattgtttctaacaatgtttgcttttcaatagtcatgtcatttaaatttatatttaatttttccaaataatatattactttcttaacatcagatgttttaatttttaaaatagtatcttcaatttttacatcaaaataatttgttaaattctgtaaattattgtctactgtatttggtactttaattattgaatattgttggttggttaatatatttctaggtgaatcatttaacttaataatgccttgatcaagaaatataactttatctgccattcgttctacttcttcaatataatgagaagtataaaaaatagatacattttctttttttaatttccctatcattgtccagaaatgttctcgcatttcaacatccatagctgcagtaggttcatctaaaatgagaagctttggttttcctattaaacataacccaaaatctaatattcgttgttgtccaccagataagtgatttgcatacagattcaattggctatcattcaattttgtaatttttttaaattcatctatcgaaattgcatccttgtatagttgacaaaataatttatataattcttttacttttattaacctaggaaaagacgttttttgaaataatacaccaatatgatttaaatttaataaatgatctatatctataatttctcccgtttctgctttcaaatgattaattaaaatattaattaaagttgattttccggctccattttttcctattaatgcagtactcatacccttttctatatttagtgatatatttttcaatactgtttttccattatattttttggataaatgtcgaatttgaatcataattcatcacttccttttgttaatataaataatttatcaacaaacaagttataatttcagataaaaatgtcactattttcaaatgacatttgtcacattaataaaaccgacaaagcacaatgctttgtcggttttattatttttacaagattggtgataataatttggcaatatcttctttgaatttaattgataatggtcgttttttatatttctcaagtgtaagttgtttagattttttaatatcttctttatacgcctcttttaacttcttagctaattgttcatcatatacgaatgcattaacttcaaagttcaatacaaagcttctgtagtccatattagatgaacctacactactgacttcatcatcaatcattaacattttagaatgtataaatccattttgatacgtatacacttttactccatattcaagcaattcagcaacatttgaaaatgtagaccagtagacaaatggatgatccggtttacatggaatcattatgttaacatcaacaccagtatttgctgccattttcaatgcattaatgtaagatcgatctggtataaagtaaggtgtttgaatataaatagattttttcgcactcataatcattttggtatatccaaactcaatttggtgtaattcatatgcaggtccacttgaaccaatttgaatggctgaatgaccatcctgtactttctttttaggaaaatacttatcatcatattcaaattgtggacgatgtgcttgagagttccaatcaagaataaacctaatttgaagtgcatttacaacatcaccttgtactcttaaatgcgtatctctccagtatcctagtttacctaaacctaaataatcgtcacctacattaaatccaccaatatacccgatttgaccatcaataacaataatcttacgatggttacgattattcattctaaagttaataattggtagtttagatgcaaaaaatgcttctacctctccacctaatgattcaaaatgtttaaatttgtgacgttttaaattttttgaacccacatcatcgtaaagtaatttaacttctaaaccttcttttaactttgtttctagggcatcgataattcgttttcctagaccatcgatttcaaatccaaagtactctaaatgtatgtaatctttcgcattataaatatcttcgagtactttgtcatataattcatgaccatcaataaataaatcaattttattgtcttcagtaataaaagcatcttgtttctttaatagcattcttgccatatcttgatgattttgtagctgcttattttctgtatgatagttgtaatgatcaattttatgagcttgttcatcaatcaaatctttataaacatctagctctttaccattatttttctccatttttctttttgaaacagttctaccgaaaaatagataaagaataaatccaagcactggtaatacaaataatacaaatatccaggcccatgttgaagatgcactacgtctgttacgctctaaaaaaattaaaataaaagccaacactaaattgcctaaaaatccaagcactaaaattatattcaatattgtgccaattttagggccaaaaagacttatcataattctaaactcctacttctcaaattcaacttttatttatcggctaatattaaaaaggcacttaatatttcttcattgttaggaaattggcgttcttcaattttatcaattgaaacatttaataattcatagcgacgaccttcttcacttgctaaatattgattaatttcattttccaattcttcaattgtttgttcttgaattcttttaaattttactttactcatttataacactccatttcatatatttgtttaaatcatagtctttttacatgtgtttatcaactaaattgcaatgataataggacgtcttttaaaagcgtttacatatttatttttattctcttaaattcacattactaaaaaggtagtgtatactaaatacattctattcaaattttcagaataatcagtttagaataagcataaggaagttagggaggaattcgatgatatcttttgaaaatgactacctagaaggtgcacatccaaaagttttacaacgttttattgatacaaattatattcaagcttcgggttatggggatgaccaattttcaaaacaagccgctgatcaaattcgaaaaacgattcaatgtcctgaagccactgttcgctttttaattggtggtacacaaacaaatcaagttgttattaatactgtattagagccatatgaaggggttatttcagcagatacaggtcatgtggcagtacatgaagggggcgctatagaatttagtggtcataaagtattagcagtaccatctcatgaaggtaagatttcacctaaagaagtaaatacctatcttgaaactttttataatgatttcaaacgtgaacatatggtatttcctggtatggtgtatatttctcatcctactgaatatggaacgctttatagtaaagaagaactcaaaaatttatcagaagtctgtaaggaacatcatattccattatttatggatggcgcccgattaggttatggtttgatgagtaatgaaacagatgtcacaattgaagatattgctaattactgtgatattttttatattggtggtacaaagattggtgcactatgtggtgaagcgattgtatttacaaacaataatgaacctaaacacttcactacacgtattaaacagcatggtgccctactagctaaggggcgtttagttggtattcaatttttagaattatttactaataacttgtattttgatattagtcgacatgctattaatatggcgaataaaatgaagcaaggatttatcaataaaggatataaagtatattttgattctcctactaatcaacagtttttcgtattaaatgatgataagattaaagatcttcagagtaaagtgaaatttgcaatttgggaaaaatacgatgatacacatcgcgttgttagattcgcaacaagttgggccacaactgaggaaaatgttgacaaacttttagaattaatttaattataaacttatttaatatagaccttaaggtgacatacttcgggtctatatttttatgtttacataatatttttataattcatataggttttattgatatatttaataaaaataggagctatatattatgaaaaaatatttagtggtagacgaacatgaaaaaacaaaaaaagctaaacaatctataattaaactagaaaattttaagaagtatataaagactgtttttttttaacttacttgaccaatacttgaccaaaacttgaccaattcactacttttgaagaaagtggtcaagtaaaaatagattattttcaaataaaaaagaagctaaggcaaatgccttaactccttatgtccctaagtctttcccctttttgcttagcgattagtattgtttcatatattgatcgcgttcccattcagaaacttgagttctgtaatagtcccattcgatagatttagaattaataaattgattatagatgtgattgcctaatgcttttttaactgtatcgttttcacgcattgcttttaatgcagtgtaaagtgtagatggtaaatcttgaatacctactgcttcacgttcttcacgattcatttcatagatattttggtttactggttctggtactttagttttgtttttaataccgtctaaaccagcttgtaagatcgcagctaaagccatatatgggttagcagctgggtcaactgaacgtacttcaatacgagttgataaacctcttgaagtaggtacacgtactaatggagaacggtttttaccactccaagcaatgtaacatggtgcttcgtaaccaggtactaaacgcttatatgaattgactaatgggttacatactgctgtaaatccacgtgcattatttaagatacctgcagtaaagtgataagcatcttccgttaattgatctttgccgtttggatcaaagaatgcattttctttacctttgaataaagatacgttgaagtgcataccacttccatttacaccaaataatggttttggcataaatgtcgcatgtaaattatgtttacgtgcaattgttttaacaactaatttaaatgtttgaatgttgtcacatgctgaaattgcatctgcatatttgaagtcaatttcgtgttgacctggtgctacttcatgatgacttgcttcgatatcaaagcccatatcttctaattcaaggacgatgtcacgacgacaattttcacctaagtcagttggtgctaagtcgaagtaaccgccattatcatttaattctaatgttggttcacctttttcatccaatttgaataagaagaattctggttcaggtcctaagttgaaatctgtataacctaagtcttccatttcttttaatatacgttttaagttcgtacgtgggtccccagcaaatggttcaccatcagttgtataaacatcacaaattaaacgtgctactttgccttgacctgctgtccaaggaaagataacccaagtatctaaatctgggtataaatacatatctgattcttcaatacgtacgaaaccttcgattgaagatccgtcaaacatcatttcattatctaacactttttctaattggcttactggaacttcaacatttttaattgtacctaagatatcagtgaattgtaatcttaaatatcttacgttttcctcttttgcaaatttgcgaatatcctcttttgtaaaagtatgttttggcatggtagacatcctccaagttattaattaataaatcgtgataaatcgccacggtttatcggtaaagcttcactgcgcggtttctgagttgcatctacaatcattctttttctcgtctcttgttcatcagtagttaagtgcccttgattatttgtaattatttgtttaataccttttaaattaaaacctttttcaattaacgttttaatttctaacagtctctctaagtcattcatcgagaataaccttttatttccttcggtacgttcgggcttaatgagttcatgtgtttcataataacgtatttgtcttgctgtgagttctgtcaatttacaaacaacactcatagagaacacggccatattacgtcttattgtatcgttagacactataacctcacctctacttttgaacttgtctataatttagcatagattaatatgaaatacaaaaatatgttaggttttctgacatgaaaattaaatatttcttacatataaacgtaaaagcccatagatacagttatctacaggctttttactatttaaaaattatttttcaagacatcaatacgatagcgtattcttattgttaagttttgaaaatttaagtttcattaatggttatcttccatatttgcttcaaagtcatcaagtaatgctcgagcttcatccacagtttctgtactcattaattgatgccgtaattcacttgcacctctaatacctcgcacataaattttaaagaaacgtcgtaaacttttaaattgttgtgtttcttcatttgaatacttttcaaataactctaaatgtaatctaaataaatccaagagttctttacttgtatgttcgcgtggctctttctcaaatgcaaaaggattatggaaaatgcctcttcctatcataactccatcaataccatatttcgtcgcaagttccatacctttttgtctatctggaatatcaccattgatagttaataatgtttgaggcgcgacttcatcgcgcatttctttaatggcttcaattaattcccaatgtgcatcgactttgctcatttctttacgtgtacgaagatggatagataagtttgcaatgtcttgcttaaacacatgtcttaaccattctttccattcctctatattataataacctagacgtgttttaacactaacaggtagtccacctgccttggctgcttgaataatttcagctgctctttctggtcgtaaaattaacccagaccctttaccttttttggcaacatttgcgacaggacagcccatatttaaatcaatacctttaaagcccatatctgctaaaccaaaactcatttctttaaattgctctggcttatcaccccatatatgagcaaccataggctgttcatcttcactgaatgttaaacgtcctcgtacactatgtatcccttctggatgacaaaaactctccgtatttgtaaattcagtaaaaaatacatccggtctcgctgcttcacttactacatgtcgaaaaacaatgtctgtcacgtcttccatcggcgctaaaatgaaaaatggacgtggtaattcattccaaaaattttctttcataattgatttaaaccttcttattcattagtatctcgtataattaaccatgatatattatcataaaataaatccatatacaaaaggaaattcactctcattatgtttattactatctatttttgaatattgtgttatactacttaaattaaattctgttcttttaaattcataaccgcacgtgttactgcaattttaacatgttcataagttagaccaccttgcacatatgcctcataaggcggacgaatcggaccatctgctgataattcaatagaggatccttgcacaaacgttcctgctgccatgatgacatcatcttcataaccaggcatataactaggttcaggactaaagtgtgcattaattggtgaagcatgttgaatactttgacaaaatgcaatcatctgttcttttgtatcaaattgaacggtttgaattaagtctgtacgcttaacatcgtatttgggtactgtgttcatattcattttttcaagaagtaaacttgtaaataatgagccttttaagctttgactcactacatgcggtgctaaaaagaatccttgatacatttcttgcaatgaaaataatgaagcacccgcttctttaccaataccaggtgcagttaaacgataaccacatcgttcgattaaatcttttcgtcctgcaatgtaaccaccaatttttgctaatccaccaccaggattttttattaatgaccctgcaattaaatctgcacccacttctattggttctcgacgctctacaaactctccgtagcaattatccacaaaaataattacatttggatatcgttgtttaatttgagaaatagcagtttctatttcatctactgtaattgaaggtcgttgtccatacccttttgaacgttgaatagcaataactttcgtttgtttcgaaatagtatttaaaacagtttcaacatcaatcattccatcttttaatgcaacttctttatatgtcacgccatgctctttgagactttcaataccattaccattaacaccaatcacttcaagtaaggtgtcatagggactacctgtaatgtacatcagttcatcgccatatttgagtgtactttgcaatgctaatgtaattgcatgagtacccgaaataatttgaggtctaacaattgcatcttctgctttaaacgtatgagcatatatctcttctaaatgatcacgtccaaaatcatcataaccatatcctgtagaacctactaaatcattctcgctcgctttaacatgatgaaatgcattaagaaccttttcctgattgatataagcagtttcttcaatttctttaaataagggtgttaacgtttcttctactttagaaacgatgtgttgaatatctgacatgcaatttatcttcctttatatataattattttctatatcctttaacgatatagctttcattattttcatcaaatttcatttcttcgataagtgtatgttgttttaaaaaatataatctatctgcatcttcactagatacagtttctacgtaatatgacaaagtcgcttttatttgatcaaacagtaactgcttcacttttaatttatcttcactattacgacttgatacaaatacagacggatggcctgataccggtacatcagtttcttcagaacattgatcttttttattaaaaatgattgcttgtggaaggtcatccatatctaagtcttttaccaattgattaaccgtatcatattgagcacgatattctggatgacttgcatcaacgacatgtagaagtaaatcagcacttttcgcttcttctaatgtcgacttaaatgctgctactaacgttgtaggcaacttttgaatgaagcctacggtatcagaaataattaaattaaacccattgttaatttgtatttgtcgtgttttagggtcaagtgtggcaaatagtaaatctttttcaaaagtcgtttcgtttgctaaaacattaaaccaagaagattttccagcgttagtgtagccaataagtgcaatttgaaacacttgattttgttcgcgttgattacgatatctttcacgatgttcgaccactgttttaagttgaagtttaatttcattcatacgtgttctaatatgacgtctatccatttctaattttgtttcaccaggaccacgcgtaccaattcccccgcctaaacgagataaactttttccatgtccttgtaatctaggaagtaagtaatcgagttgagctaattcaacttgtaatttaccttctctactacgcgctcttaaagcaaaaatttcaagaatgagctgtgttctatcgataattttaatgcccaaattatcatttaatgtttttgattgtgctgttgttaattcatcatttgtcacaacaacatcgatgtcatgaaattctataaaagctttaatttcatcaatcttacctttgccaacataatatttataatcaaattgatctttattttgagtgacttgtcctttaacatctaattgacaagtcaacgctaaagcttctaattcttccattgtagattcaaaattatattgatgatcactttgagcatgtacaccaactaatacagcagtttctaactttttctttgtatcataagtgtgttgctgagccatgatatacatctccttttctaacatgtcttacatattctatcatagagcaagtttaaagactaacgactaaaactatgttaaattaaagctaaattgaaagggtgatagtatggaaaatatttatgattttgaagttcaaaaatctaatggtgaaaattataaattagatgtatataaaggcgatgttatgcttatcgttaatacagcgagtgaatgtggatttacaccacaatttgaaggattacaagaactatataataaatataaggaccaaggatttattgttttaggtttcccatgcaatcagtttggaggtcaagaacctggttctggtgctgaagcaaatcaaaattgtaaaattaactacggtgtcacattccctattcatgaaaaaattgacgttaaaggcgataaccagcatccattgttccgttatttaacaagtcaagctaaaggcatgttaagtgaaaaaattaaatggaatttcactaagtttttagttgaccgtgaaggtaatattgttcaacgcttctcacctcagaaaaaacctgctcaaattgaaaaagatattgaaaaacttctataaattaaataaaagcttcaatatagatgactatgtcatagacaatcgttctatattgaagctttgttttattacaaacatttcctttatttgttcaaaagtgcaaaaattgatgagaattttgcaagctacgtatacatttcgaccgtggactacgctctaaaattcagtaacttggcactttaattacaacttattcttcaccttcgcctgtagcttctgaatcagtagattctgtatccacagtgaaagtgctgatcgcatgtttgtaaatcaaatgttgtttgccttgagaaactaagctaatcatgtatttatcaaagtcttcaataacacctttcatttgaaaaccatttaagaaaaatacagtaatttccgtttgttctgctttaaagttctctagtgcttgatcttggatgttttggtttgcaatcatgtttagaactccttttatttatttgggttgtaatctcatctaacatcatttgaagtgacattgtctctctatcaaaccattgaacattcattttgtttttaaaccatgtgagttgtcttttcgcatattgccttgaatgttgttttaataattctacagctggttctaattccatttctccttttataacagggacaagttctttgtaaccaattgcttgcatactctgactagattcaaaaccttgttcaactagtgctttcacttcattaaataatccgtggcccaacataatatcaacacgtttatttattcttgtatataatgttttgcgcgacatttcaatccctactaataatgtatcataattttctgtatattgttgaactttctttcgagaacttaaaagtttttttgtttttaagtaatattcaatcgctctaagtactctttttctattatttggatgaatatctttagctgatgtttcatcaaacgatgccaagtaacgatgtaagtcatcattattcaattgatttaatgcatctaatttttcttttactcttaattctttttctactgatacattttcatcatcaaatggataatcgtaaattaaagactgaatatataaacctgtacctcctgcaataataggtactttacctctttttgtaatatcttcaataagcacttctgctctttttttaaattcgtatgcagaaaatgattcatcaggatttaagatatctattaaataatggggtatcccttccatttctgtttctgttacctttgcagtacctatattcatttgacggtatacttgcatcgaatcgccactaatgatttctccattcatttttttagctaattcgatactcaattctgttttacccgaagctgtcggtcctacaataactactagaaaaggtttttttgatgcttgcaatgattacgcctcactctgattatttttcaatacttgtttttgaatccaatcaaacatatgattccatatcatttgttgatcaacttcaaataatatttcatgtcttctatttgcataaagttgtaccgtaatatgtttaataccagcttttttaaattttctggccaaggatttaacacctctgccatactctccaaaaggatcattttttcctgaaatcatcaatattggtaactgtttattcattttttttaattgagtataatttgcagtacgtgtcatatgttttactgtttcataaattaattggtttgaaactaaaaagccggtatactcatcgtttacaaatttatcaacttctgtagattgtgatgaaagccagtcactttcagttcgtggttgatcaatctttttgttaaatgatttgtaaacgagttgattgacccattttaaacgcttgcgcttcccagtaaaaatagaaattaatttcaaactgatccctgcaggaattcctttccatttaggatattgtcctgttccagttaatatcaatccattagcaaaatttggataagtttcaacgaataaacgtgcaataatagatcccattgaatgccctaatacaatatagggtaatcctttctcactatcatataatgtttgtgcaatttcaaacgcatcttgaacgacttgattcatgctgtcgtaatgtccacgttctttctcatcaatctctttcccatgtcctctatgattatgtctaatcacatcatagccttgatgtgttaaagctttaacaagtgtttcgtatcgatccatatgttcagccataccatgaaatatatgtacaataccataagtcgctatgtttgctttatctactttaacttctaaagttgttccatcttctacagttattttataagcactttgccccacgtatatgcctccaatctctttctataatggtattgttaacaacgtactattcctactaatatacctatactctttaatgttatcaaatagtttgtcactttttaataggttatatatactttaaactcaaaaattttatcaaaatataaaaaaaactgagattgagtgtttttacccaatctcagttaatatactattttaactatatttatttttctgcaggttgatgattaccatgtgttgcttcttcaatagcttcatcaacttctttagaaaattcatttttttgttcagcagtataatttaataatttatctaattcatcaatgattgcttgtttatattgtttaactgtattgatgtcaaaatataatttaccagtacgacgaattaagaaatcagttggtttatataccatttcgttttgtacactataaactaattgaacgtataattctaatggcatatttaaatctttttcattcgttaattgtgcaattgcgaataatttatctacatttgaaccgtattttgaagctaaattatgtgccacatctgtgcttaatccaagtgctttaccttcttggactttacgatttacgtagttttcaaagtttttactaccgccaacatctccaccagaaataggtgtatttttagttttgctatccgcaaattttagaccatattcttgttttaaacgcttagctaataaatcaacaatttctaatgccatgtgacgatatccagttaatttaccaccagcaatggtcaataatcctgatttaccttcccaaatttcatctttacgtgaaatttctgaaggatcttttccatcttctaaaattaatggacgcacgccagcccaagttgattcaatatcagcatccgtaacatgcacatcagggaacatataattgattgcatcaattaaatagtctctatcttcttggttagttaaaggttttgttttttcattattatagaatgtatcagtagtacctacatatgctttaccttcacgaggaatagcaaaaatcatacgaccatctttttcagtatcaaagtaaaccgcttgacgtaatgggaattttgattgatcgataactacgtgaacaccttttgttaaacgtaattgtttattattacgtgtataatctttctttctcacttcgtctacccatggaccagcagcattgattacttttttagcgttgatttgatactcttcacctgtaagcatatcttttactttaataccacttactttatttttagcatcgtatacgaagtcagtagatttagtgtgattaatgacttcagcgcctttttcagcagcacgtttcatcacttcaattgttaagcgagcatcgtcagtacgatattctacgtagtaaccgccaccttttaaaccatcttttttcacaagaggttctttatttaaagtcgcttgtttagataacattttttttcgttcataacgtttaacgcctgctaaacgatcgtacattgttaacccgatattagttgtgaatttaccaaatgtaccccctttatgcatcggtaataacatccattcaggagttgttacgtggggaccattttcataaactattgcacgttctttacctgtttcagcaacaactttgatttgtgcttgtttcaagtaacgtaaaccaccatgtactaatttagttgagcgagaacttgtaccttgcgcaaagtcttgcatttctactaaagctactttcataccacgttgtgtagcatctaatgcaatacctgcaccagtaattcctccaccaataactacaacgtcaaattctttatttcttaaattctttttaattaagttcctattaaaagtagataatgccataatataccctccaaaatttatattaaaaaaagagaaacctatacacacacagaagcatactgcatgataacaggtctctcaaatctcgactaatgtattaacttaactacatcataacatattctttgtaactaagccataattaaaaattaatcttctaatttaaagacctgagtagcctctactgctttcttccaacctttatataacttagttcttgtttcttcagacatttctggattaaattctttttctaatttccatccatcagcaatgtcttttttatcttcccaaaagtctacagccaaacctgctagataagcagctccaagtgctgttgtttcttgaacttccggacgttcaactgatgtatcaacaatatctgcttggaattgcattataaagttattttttactgcgccaccatcaacacgtaaattatttacttcaattcctgaatctttagacattgcttccataacatcacgtgtttgataacataaagattctaatgttgcacgaatgaaatgttctttttcagtaccacgagttaatccgaaaatcgcgccacgtgcttcagaatcccaatatggtgtaccaagacctacgaatgcaggaacaaagtagacattatcagtagaattaacacgtgttgcatagttttcagtttgcggtgcagaattaataattcttaaaccgtcacgtaaccattgaattgctgatccagatacgaaaattgatccttcaagggcataatttactttaccgtcaagaccataagcaattgtagttaacaatccactttcagacgttacaggttcttcaccagtattcattaacatgaatccgccagtaccatacgtatttttcacatcaccacgttcgaaacaagcttgaccaaataatgctgcttgttggtcaccagcaataccagcaattggtacttcttgaccaaagaagtgataatctttagtatgtgcataaacttcactagattctttaacttctggaagtattgctttaggaatgtctagtaattctaataattcatcatcccatttaagttcatgaatgttatacattaatgtacgactggcatttgaatagtctgtaatatgtgcttctccaccagatagtttccacactaaccaagtatcgatagttccgaataataaatccccattttcggctttctctcttgcacctttaacattatctaatatccatcttacttttgttccagaaaagtaagggtctaataataaacctgttttattacgaaatgttttttcgtggccttgttcttttaattcattacaaatatgttgtgtttgacgagattgccaaacaattgcatgataaattgggcgacctgttttcttatcccaaatgaccgtagtttcacgttggttagtaataccaatacctttaatttgttcaggatcaatttcattttcatttatcacttcagccattactgctaatactgatgtccatatttcattagcgtcatgctctacccaaccagatttaggaaaatattgtttaaattctctttgcgcaacgccttgaatttgtccttctttatcaaataaaattgctctagagctagttgtgccctggtctattgacatgatgtattgttccataatttttctccttctttcattctgactgtatgtgttaagtatcctttgaatcacatagtcaatatattatatgatttaaaactaaaatttttcttttaataaatcgattcaatatctttatgtttatttgatttattaagcgctaaaccaatcagtaatgtaacaatcaaaactacaatgctaacaccactcataaaagtaaattcatttttataaaaaacctgataaatcacagcacctagcataccgccagcaattggtcctagtactggtacaatagcataccaccaattagatcctcctttaccagcaattggtaaaatcgcatgtgcaattcttggtcctaagtcacgagctggattaatggcataacctgtaggcccacctaaacttaaacctattgcaataattaaactacccacaattaatgggtttaatccatctgcaattttatttaccccaataaataaaatccctaaacttaaaatagcagttccaataatttcacttaaaaagttagcaaaataatttttaatagcaggtgcagtagagaatacgcctaattttgcaccttgatctttagttgctttccaatgtggtaaatacattaaccaaacaagtgtagctcctacaattcctcctaacatttgacaaacaatatatcctggtacttttatccaactaaaacttccctcaactgctaaagcaattgacacagctggatttaaatgggctccagaaaattgtcctactgcataaactcccatagttacagctaagccccatccagcggcaataacgatccaatcagattcttgtccagcgctacgttttaaatttacatttgcacatacgcctccaccgaacaaaataagaatggccgtgcctaaaaactctgctaaataagcattcatgttttaacctcctacaaggcaaagagacttctacaaactatataattagggttgcagaaatctcttcatctctcattcaaatattaacttgtataaatcatacaaaataattgtaagcgttgtcaatgatttttgtaaaaaaattgtcacaatttattttatagattaaaagagcgtattataattattttttatcaatacataaaaaaacctgagacatcaattttgtctcaggttaaaaatataatttctaccataattttctgttacttgtggttacataacttgcaccactattaattgcatcattcacttctttttcttcttcgattagcccacctgctataattttagcagtcgttgcttctcttacattttcaacaattttatgagcaatacctggtagtacttcaacataatctgggtccactttctttatgagttgtatactacgattgagtgcttgactatcaataataaaaactctaaaaatagtaagtacatttaatgattttgctttttgaataacttttgtttttgttgaaacaatcccttttggtttataagtttgaatgatatattcacatgcatattcatcatgtgccattcctttaattaaatcaatatgaatatatgcttcaatgtcatgttttttaagtaactctataatgcttcttaaatgacctacatgcatatctaaaaggacacacactttataatccgtttgaattaatttctctaaatctttcatatttcgaattgctggtagtacgtgttctttcatttctatgcatcccttctacattactcgtttaaataatttctctaattcataatttgaaaagttaataataattggtctaccatgaggacaagtaaatggatcttccgcttctcttaattgatcaattaaatctgccatttcattcttttttaaataatgatttgctttaattgacttcttacaactcatcataatagctgcgtcttcacgcatttttttaacgtcaatttttttatgatttaatacgagttcaatcatatctttaataatttcctctgcttccactttaggaaaccatactggataactatttacaatatagtcatatccaccaaaatgttctaaatggacccctactttatcaagttcttctcgatattgatcaataattaattgctcgtcttttgagaagtgaaatgttaaaggaattaacaaatcttgtacttcatttgatacttcgcctatcttttctctgaaatattcgtatttaatacgttcttgtgcagcatgttgatctatcataaacattccattttcattttgagcaataatataggtaccgtgtacttggccaactacttccatatatggcacacgtcgagacggtgttgaacttactttacctttaatatcttgttcttcttgatttgtaacattctcttgaaagtcatcattttcatcataattataaatattggtttcatcatgtcgagtgttatcgattgaagattcggcacgatctaaactatttaaaatatctttttgaatgtcgaagtaatctttatccatactacgtttattattatagacactagaattttcgttatcttctctagtgtaagaatcatcagaggtatgtgcttcatcatattgatgacttattgttgaaaaggtattgttagtcgaaatgttggggtcatttttattttctaattgttttgtctcatttgaaatattttgttgtttttgttcaaaatcgattttttgttgttcaaatgtatgcaatactttattttttttaggtgttcgatctaaatcgtttttaggaattaatattctatctttaaatgcatgtctaattttttcaataattaaattataaagttgttcttcttttgaaagtctaacttcaagtttcgttggatgcacattgacatctactaaaattggatccatttctatattgatatagcaaatagggtaacgacctatggttagaagtgtatgatatccttcagtaatagctttatttaaagcgaaatttttgatatatcgaccattaataaaaattgaaatataatgtttattactacgagaatgttccggtttagcaacaaatccttctaaatgatagtcactagtatcgccagaaatgtgaactaaatcttttgcaactttaataccatatatttcagccatcacttcatttgttcttccagaaccattcgtttttaacatcgtttttccatcagatataagtgaaaagcgaatgtttggatgactcattgccattcgattaacaatatctgtaatttttcctaattctgtatataaacttttaatatattttaaccgagctggcgtattataaaataatgattctaccttaatatctgttccttttttggcttttgctggtttttgagataatatttcaccattttcagcataaatttcgtgaccattttcattatctgtacacgttttaagtgtcactttagctacagatgaaatactggccagtgcttcacctcgaaaccctaatgttctgatatgaaacaaatcgtcatcatcatttattttactggtagcatggcgatgaaaaacaagttgcaaatcatcttgctcaattccagttccattgtcgactacacgaattgaggaaatacctgattgttctacttctatattaatttcagtcgccttagcatcaattgcattttcaagtaattcttttactactgaactaggacgttcaaccacttctcctgcagcaattttatttgctaaagatgtttgtaattctttaattttacccatgtattaacacctctatcttaactgattttgtaattcgcttaacttaagtaatgcttcaataggtgtcatatttgaaatatttaaatttttaatttgtgcttctatttcactttgtgtttcattcgaattaaataagtcaaaacttgtttgttcaaacacatctgtttgtttaatagttgagtgttcttccttattatttaaatgattcttattttcaatatctttagagttgtcattataatgttgacgatggacattctcatctaatactccattttgttcaaacgcatttaaaataacttgagctctttcaattactttctcaggaagatttgctaatttagcaacttgaataccataactatcatcaacggcaccctctttaactttatgaaggaaaataagttcaccttgatactcatctgctgctacatgtacattttttaaactagatagctgttgatctaatgttgttaattcatgataatgggttgaaaaaagcgtcttagcatgtgatgtttcagatacatattcaatcatagcttgcgctagagataagccatcatatgttgacgttcctcgtccgatttcatcaaagatgattaaactatctgctgttgcgtatgttaatgctttttgtgcttctaacatttcaaccataaaggtacttttaccggatactaaatcatctgctgcaccaattcttgtgaaaatttgatcaaaaatcggtaatattgcattatcacatggtacataagctcccatttgtgccatgatactaatgattgccacttgtcgcatataagttgatttaccggacatatttgggccagtaatcaaataaataaagttattttgatcaagataacaatcatttggtacataatcattataatccatcacacgttctacaacaggatgtctagaattttctaagttcaatgttttatcatcactaaattttggtctaacatagttatatttttgtgcaatttctgcaaaactttgtaaacaatcaagctctgatatcacttttgcttgtctttgtaatctttcagtatatgatttaacatgctctctcaatcgaataaacagttgatattctaattcaattgctttatcttctgcacctaaaataatatcttctttttcttttaattcgtctgtaataaatctttctgcattagataaagtttgtttacgatgatagccatgctcgcttggttcgaatccttgaagattagcacgtgtgatttcaataaagtaaccaaaaactttattgtagctaatttttaaagatttgatacctgttctttcacgttctttcgcttgaagttgtgcgagccaatcttttccatttttagatgcttctaaatactcatctagttgtttactgaatccttgtttgaacagccccccatctttaactgaaataggtggttcttctactaaactatcttccaagactgtcagtaaatcttctaatggttctaatgtgctaaactgcgttgttgtcacactattcatttgttcaagaagtgatttaatatttggaatttcagaaatagaatgtttgagttgaatcaaatcacgagcatttacatttccataacttactcgtcctactaatctttcaatatcatatacttgattaaggtaacctcttagagtatctctttctataaaatgatcaataaatgattctacgatatctaatcgttgttcaatattgtctttatgaataagtgggcgatcaatccactgtttcaagcgtcttgcacccataggtgtttttgtttcatccattaaccataacaatgttccttttttactttttaaacgtatgctttcagtaagctctaaattgcgttttgcataataatccattttcataaagtcaatcgccgcataggttatcacgtcttcaatatgagacaaatctcttttttgagtatgatgaatataatctaacaataattgtgttgtcaaaaacattaaattattttctaatgtattgacactatattccatatcagaaatttcttctctaactgtaatcgtttctgtagtaagtgaaatttgtttttttaaatcttcatttatgtcttctcgtactacaatttcatttgggttaatcgtaatgatttcattaattaacgtgctttcatcttcaaaattggtagcttttaattcaccagtagaaacatcacaataacttaatgcgtatccattttcattctgaatgaagctaagaatataattattttgattttcatccattccgccttgttccatcattgttccaggtgtgactactttaactacttctcttttaaccatgcctttagtttgttttggatcttccatctgttcacaaatagcaactttatatccattgttaataagtgtttcaatatagctatttgctgagtgatacggaacaccacacattggaattggattttcttttttagcatctcttttagttaaagtaatttctaatactctagatgcttctttagcatcttcaaagaacatttcataaaaatcacctaatctaaaaaacaataagcaatcttgatattgagattttatttttaaatattgttgcatcataggtgtcacattagccatatttttttcacaaccttactgatatatacttgtttctcacattttaacttgtatattttaacatatgtcatactgaagcgctcgttatctaaattagaatattattctacaacttaaaaataaaagattatcatctctttattccgcttaataaacactaaacttattaagcgtatgaaatgataatcttaaataaaatatttatttgaatttatctaataatccacgtttttttaacactataagtaagatataactaatcgccgcaccaaggaaacttgaaactaaaaatacaagcattaatggtttgataaagaaatgttgcaaacctaatatccaagatagtggaatgcacattaaactaccaatgattccagttccaatcacttctccaactgcagccataaatatgtgctttctatacatatagaagatgctagctagaaacacaccaatcatactaccaggaaaggcaaatgcactgccagttccaaatattattcttattaaagaagaaatcaaagcctgtgctaaaccataccatggtcctacaaaaacagcacatagtacatttacaaaatgttgtactggggctgcttttactggacctaaaggtataataataaaactactaaatacgacattaaaagcaatgagtaaagctgtaatggtaagttttttagttttcatctttgaatattcccttctgtttatgagtcatgatgtgctttttcattatgcttatttaaactttgttccatagtagaaaccatcaattgcaacaactcatttgcttcaaattgcgctgaccgaaactcttcaacaataggtaatgcattgatttctttttcaagttgagaaatttctttttcagatttttgataagcctgatgcttgccataattttgaaaatttactgactgtttttgttgcaattttaattgtttcattttttggtcaattgatgaattctcatgaatttgttgctctacattttgatattgtttaatcaattctagtccctttattttgttcgatacactatctgcttgttttagaatatcttctttctcatacatattaattagtcaccataacttgattatgaaaatgtaaaaattcaccatttaatgagtattgttttgcttctttaactttaacatcaacaagctgaccaatggcttcacgtggtcctttaaagttaactaatttatttttttcagtataacctgctagaactgtttcatcttttttacttgttccttcacataaaacagtaacaacttgtccttcataatgttgcattgctttttctgaatattgaccaacttttttatttaaacgttgcaagcgatcttttttcacttcagttggaacattatctttcattttagcagcaggcgtaccatctctttgtgaatacaaatacgtataagcatgttcaaattgaacttcatcgtataatgaaagtgtttcttcaaattgttcttctgtttcgttaggatatcctactattatgtcagtagtaagggcgacattaggaatagcttctttaattctatcaactaaatccaagtaactttcacgtgaatatttacgtcccattatttttaatacagcattatttccagattgcacaggtaaatgaatgtgaggaacgatatttccaccttttgcaatcacttcaatcattctatctgtaaaatcccaaggatgactcgttgtaaaacgtacacgtggaatgtcaattttagaaatatcctctaataaatcacctagaccataatctaaatctttaatatcttttccatatgaattaacgttttgtcctagaagcgtaatttccttataaccttcacgagcgagacctcgaacttcttcaatgatatcttgtggtctacgactgcgttcttttcctcgtgtaaaaggtacaatacaatatgtacagaatttatcacatccatacataatattaacccatgcttttgtacttccttcacgcactttaggtaggttttcaataacgtcgccttctttagaccaaacctcaacgaccatggcttttgataaatatgcttcttctaaaatttcaggtaatttatggatattatgcgttccaaaaatcatatccacattttgatatgattttaagattttatttacaacagattcttcttgtgacatacaaccgcatacaccaattaatgtttcaggtctatttttctttaaatgttttaaattacctatttcactaaatactttattttcagcattttcacgaatagcacatgtattaattaatataacatccgcttcattaatatcatcagttgcttgatagtctaaagcttgcaaaattcctgccattacttcagtatcatgtgcattcatttgacaaccatatgttttaattaaaaatgttcgtcctttccccatacctttatatttatcttcaatatgaaaatctcggttatattgaacatcttgtttaccacgcttttttgcttctttaagattaggtggttgataaacatgttcgaaatatttactatagtctttttctgcttttttattacgttcgtttaaaatatctatcgtaccagcttttctttgctcttcattcactttacaaaaatcctttctatatgacctaatatcattagtacattatattaaaattagcattaaagtgcaaaaagagtttacaaattaatatattctattattaaatattgaataaaaaagtggaatagatgtcatcttgaatcttactccactttaactaaacttcatttaactttaacatatgttatgcttcatcatatttaccagttagagtttcaatagatatcccttctggcacatgataaaacttcacttggctaataatactaggacattctaattcaaccattctttcattcaatttttgaattaaaattaagcattcactcatatcaccttggacagtcgtttcaagaggacctactctgtaatgtagccccgactgatcgataattttaatagcttcatctacataaggaataacatcatcattattaggtgttttaggaactatttgtacactcattaacgtatcttgcataaatttcacctctatgatttatttataattttattttatcatgattatctttataaatctgagttattctatattttctattgcagattttatggcttttgcaaagtcgtacattaatttatcccaatttgactgattttctctactttttcgatttattttattatttttgaaaaaagccttacgtaatgaggtagttaactcaatttgtacacctctacctctagttgtacaattaacaatattattatcctgttgacctgaaatatggcttggtgcttcttttgcttttataccaatatgatttaattgttctttgatgagtgattttagacgttcatcttttccaccaacataagcaatgctctcgttcccttcacaaccatgaatagcaatagcttggttactttcagttaccagattcattgcatctttattatcataacgtgtagaagttacgtgcaattctttatttcctttactacgtaaaccttcgaaaataaagtaattatatcctccttcatcagcaattatacttgctaattcagttgtagcaggttcaatgcctccaccatgaattgctaatattgaaacactactatttcgatttctagttattattttccagtcttcattttctatcgtttctttttccaattcttgcattgatttaaatttgtccaacatccccactccttttatttactatattattttcttccctaataaaaataaataaatgaagtttaacaagatttttataaatttaaacttaaattaaaagacattcttgaagtcatatgatactttcaagaatgcctttaaaaaaattatacaaattgagcagttaagtcattaaactcttgttcagaaagacggatatctcttttagttaatgcactttcatctaattcttcaatttgtgattcatatgaaggtgttgttgtgtcttgatatacaatacctttaactagtgattcatgttctaatacagttttcatcgctaattgtttatctgttggatcataattttcaatatcttctatactagttaagtgttctttaaaccaatcatacgtattcactttattatatgttacacatggagaaaacacatttacaaatgaaaaaccatcatgattaattgcatcttcaattaatttcgtcaatgctttaatatcacttgaaaaaccttgtgctacaaatgtagcacctgatgatagtgctaattctaatggcgcaacatttttttctatatttcctttaggtgttgatttagttacaaatccaacagcagaagatggggacgtttgacctttagttaggccataaatttggttatccataacaatataagtaatattcatattgcgacgtaatgcatgaattgtatgacccatgccaatcgcataaccatctccgtcgccacctgaagcaatgactgttaagtctttattagccattttcactccctgtgcaagaggtaatgcacgaccatgaataccatgtaccccataagagttaatataacctgataaacgacctgaacaacctattccagtaattaatgccacttcttcaggttctaaacctaaatttgctgccgctttttggattgcagcttgtactgaaaagtctccacaccctgggcaccagtttggcttcacactgtttctaaaatctttaaatgtagccaattacatcatctccttcatatctttagctactgaaagtcctttttcttctatttcatgtggtaaaaaaggtgtaccatcatatttagtttgattaactaatttgtcttgaatggcagtattcatttttaagatatttgataattggccttgatagttatgctcagctactatgacgcttgaagctttatcaatagcttgttgaataatatcttttggtaatgggtgaagttggcgaatttgcatcgtattaactttaataccattattatttaatcgtttacttccttcttcaattgcacctttacttgaaataaatccgatatataaaatatctgctttctcatgtttctcatcataatcaacaggtgtttcaataagtaagttcgcagttttactcatacgtttttccatttgttcacgtctgttgtcagcagcttcacttggcttaccttcttgattatgttcaacaccagtaacatggtgaataccacctttaacaccagggattggacgttgtgaaattccagatgttgtaagtgcataacgtttaaagtatgatctatcatcttcatcacgttcaatatctgattgaataagctctccacgtttaatttgaattctattgtaatcgagttgttttactgtttgtttacctaatgacaattgcaaatcgcttaatacgataaccggacattgatattcttcagctaaattaaaagcttccatagttaaataaaaagcatcttcagcatcagttggtgctactactatcttaggaatatctccatgtgttccatatatcatttgcattaaatctgactgttcttgttttgtaggtaatccagttgaagggcctccacgttgcgtattaacaataactagtggtgtttcagtcatacctgataaaccaatggcttccatcattaaagataaacctggtcccgcactcgcagtaaatgctctaactcctgcatagttcgcaccaattgccatattcgctgcagcaatttcatcttcagtttgtactacagttcctcctacttttggaacatttgcaatcatatactccataatttctgaagcgggcgtaattggataagctgccataaatcttgaaccagccgaaatcgcgcctaatccaattgcatcgttaccaatcatgtataaatgtggtgtaccctcactatcttctagtaaataatcaccatttactgtatctaatttatccttcatcaactcataaccctgatgaagcgcttctatattcatttcaacaactttttgaccttttttagtaaacatatttgtaattaacgttttgaaagttgttgtatctaatttcattactgcgcaagttgcaccaatcgctaccatatttttcatcagtgcagtacctaattctttagctgttaatgttaacggtaattcaatcagttgagcgcgacaatgttctggtttagaaggtttagctttagcatctgcaataataatactatcttctctcatttcatgatgatttaattcaattgtctcttgatcaaatgcaactaaaatatctaaatcatcactaattgcatgaactggagaagttgagactcttattttattatttgtatgaccgcctttaattcggcttgagaaatgtcgatatccatataaataataaccttttcgattcattgcagtagcaaatatttctccagttgactcaataccttcaccttgttgtccgcccactttccatgatatttgtggtttcatatcattagcctcctgtggaattaattcatactaaatcataacaaaaataaccaccgtcttactatgtcaacagtggcttttatttaaattcatactaatggactatacactatttatcaaaaggatgatcctcattgattaaaatgcgttctatgagtttggttcttccatttttatctaaatctataataacacctgaaagtacacttctaccattatcaggcactacatgtcgttgtggcaaacttgtaataaaacgcttaataacttcctcgcgattaatccctagtattccatcataataaccagtcatacctacatctgtaatatagcctgtaccattgggcaaaatacgctcatcagatgtttgaatatgagtatgtgtgcctacaacagcgctgactcttccatctaaataccaacccattgcatttttctctgaagtagtttctgcatgaaaatctacaaaaatataattagtttcttttttagcttcttcaatcaattgatctgcttttttaaatggatcatcaatatcttgcataaatgagcgtccttgcaagttaatgatggcaactttaatatcattaacctgaataaaacgcataccaacacctggcgcttcactcggaaaattagcaggtcttatcattcttttagcatcatcaataaagtcataaatttctctttgaccataagtatgattacccattgtcataaaatccacgccatctctaagcaattgtttatataatttttcagttaaaccttttccatgagcagtattttctgcattaacaatgctcaacgtaggcttataagcttgctttaatttaggcaaatattcagcaatggtatttctccctacttttcctacgatatctccaataaataaaattcgcattaatgttcatcctctcacaatatagtgtaattgaaataactatataattaaaggtagagtttcatattttttaaaattacacagtcttaactttagcatgcatacagcatatgttattataatattataaaaatttaggagttgtataattaaatgtctattaatatcgatccagaaaaatttgcagaactagttgtaaaagcaaacccatcaaaatcagaagatgcagaagatatggccaaagaaagcttagaattatatattaacgcataccgtttagcagaaagatattctaatattgctacaaattgttatgatacagctgaaattctttctgaaatcaaaaaaactgatttacaacttaaataatgaaaaacctgagacattttaaacatgtctcaggttttttagtactcagtgagtccctatttaattttaaaaattacttcgcatactctactgctctagtctctctaacaactgtcactttaatatgtcctggatattgtaattcttcttcaatttgattttttatatctctagctaatcggtaagattttaaatcatctatttcttcaggagaaacaataactctaatctctctaccagcttgaattgcgaacgctttttcaacaccttcataactttctgaaagagtttctaagcgttctaatctacgaatataattttcaagtgtttctttacgtgctcctggacgcgcggccgataatgcatctgcagcagctactagaattgaaattatagatgttggttcaacatctccatgatgtgaatgaatcgcattaataacagtttcaacttcaccgtattttttagctaattcaacaccaatttcaacatggctaccttcaacttcatgatcaattgctttacctacatcatgtagtaatccagctctttttgctaaactaacatcctcgcctaattcagcagctaacattccagaaagatgtgcgacttccatagaatgttttaagacattttggccgtaacttgttctatagtttaagcggcctaaaattttcactaaatctggatgcatattgtgaacattgatttcaaatgttgcttgttcacctgcatctctaatgatgtcatctacttcttttctagctttatctaccatttcttcgatacgacctggatgaattcttccatcagagactaaattcactaatgcagtcctagcgatttcacgtctaattggatcaaatccagataaaatcactgcttcaggagtatcatcaataatcaagtcgatacctgttaacgtttctaaagtacgaatatttctaccttctctaccaataattcgacctttcatctcatcatttggtaaattaactactgaaacagtagattccgttgtatgatcagcagctaatctttgtacagtagtagctaacaattcttttgctgttttgttaactttttctttagcttctctttctttttccttaacaagcactgcaatatcttgtgacagttcttcttccactctatgaagttgttcattaactgcttcctcttgagtgagaccggagatgcgttctaattcttgttcatgcttcattattaacgtctgaacactactctcttttgcatctacttgttgttgtctttcttcaattttggattctttttgatctaaaatctcatcttttttatccaataattctgatttacgatctaaattttcctctttttgaagatttcgggcttcttgtctttgaagctcactacgtctttcacgtagctctgtttcaacttgttctctaatgatttgattttcttcttttgcctctaataatttctcttttttgatattatctgcttctttttgtccttgtttgataatatcattagcagtttgtctagcttgaatttgcttttgatgtaatatatttcgggctaaaaaataccctacaacaacccctagaataatccccagcaaaatgagtaggaggtctaataaattcacataaacacctcctttttctaggtatttgcttgtatattaaaatctctatgattttttataaattgtataaataatatacatattaattgtacgtttatgtactcagtagtgtcaagatatgaaatttcacttcaatttcactacacatacttataaaagaaagagagtgacattgaattcatttcgaactcatcattcactctcacacaaaataattttaatatttttaagtatattctagttaaagcattaaaaatttaacattattcttcatcgaataatgtttgtgatgatttatcttcattttcttcaacatcaccatcgaaaatgcctaatttttcacgtaatttgcgatcgatttcatctttaatttgagggttttctttaagatatgttttaacattttccttaccttgacccattctctcaccattatatgagtaccaagcaccagatttatcgacaatatcattttctacacctaagtcaattaattcgccctcttttgaaataccttgaccatacatgatatctacttcagcaattctaaatggtggtgctactttatttttaacaactttaattttagttctgttacctacaatatcttgaccttgttttaattgttctgcacgacgcacttctaaacgtactgagctatagaattttaatgctctaccacctggtgtagtttctggattaccaaacattactccaactttttcacgaatttggttaataaatatagctgtagtatttgattttgaaattgcacctgaaagtttacgcaaagcctgagacattaaacgtgcttgaagaccaacatgtgtatctcccatttcaccttcaatttcagctttaggagtcaaagcagcaactgagtctacaacaacaatgtcaactgctccacttcttacgaaagcttctgctatttctaaaccttgttcaccatggtcgggttgagaaagatataaattatctatatcaacacctaatgcttcagcatatactggatcaagtgcatgttcagcatcgataaacgcagcaacgcctccatttttttgtacttcagcaatggcatgaagtgctactgttgttttaccggaactttcaggaccatatatttcaataattcttcctttaggataaccacctacacctagtgcattatctaaagtaactgaaccacttgatacactagatacacgacgacctttattatcgcctaatttcattactgcacccttaccaaaggatttttccatattttttataactgtatctaaagctttttgacgatcattatccaaagcgaaacctcctatatgagatagttatctatttaatattatatatatattatactcttaaccatattcaaacacaagtattttgcgaatatttgttcgtataaaaaagaacaatgaatacaaaatcgaacaaatgtgcccgaaaattataaccattttttaatttaagtacattttagtgccaatttaataatcttattaatacataattttgacttctgttgggcagtatatttcttgattgtgttatcttaaatgtagtcattttaaaatcatcttttgtattaattgctagataaacttcctctttctcatgtaatattgctatacccatttcagttttatataaatcttttacatatgaagaggcgtctcttaattgcatttcaatacttgaatgatgatttaaaaatatatcattatctggtaatattccttttaatatattttgtttatcaaagcgttttaaacgagtataaatcgctccatccgttaccccgtcatatatacttactgtagaattcatttgttccattacagattgttctaacaatgtgtcatctgaaccataataaaattgaccaattcgttctagtatttcttcttttataggttgaatcaatgttttacattcactttgtgtagaagcatttgctgttaatctaatatatacttcatgtttccctgctaacggagctatcgtaggattagtttgtttttcaattaaatccataagttctgtttcaactttcgattctccaattcctgcaaatctcagttgctctgaaaaaatagtattgtcattatctataagtaatggaagcaactcatttttagccataggttgcatttcactcggaggaccaggtaacagaattacttttttattatccatttcaataaacatacctggagccataccataatgattttttaatactttcgctccctctactacaagtgcttgttgtttattattaggtgtcatttcttgcccttgttctttgaaaaaatcttcaatataatttaatgcttcttcattagtcactaagtttttatttaatacttttgctactgtctgtttagttaaatcgtctttagttgggcccaatccaccagtgagcactaatgtgtcaaatctttttagtccttctctaataataaattctaaacgatcaggattatcaccgataactgtatgttcaactatattctttccaatttgattgaaaagttttgataaatattggccatttgtatttgctatttgacctaataataattctgaacctactgctatgatagatatattcatatgtccctctcccttatatagtcttaattcatattttatacttaatctattatataatctaaaaaataactcaaaaaaatgagagtcattttatgcgactctcattacatttcactttatttgattatacttttattgcttaaacacatctctacctttatagaaatattcaattcctgataatattgtaaagaatacgccaatgtataataatacttgtcctaattggaatccaatccagtttgagaataaatcaccaagtaaaatccaaataattgctaccattgtaacagctgttttaattttacctaattggcctgctgcactcacaaatccttgttcaatttgaagtaaacgtaaacctgtaaccgcaaactcacgagcaatgataataattgctacaactgaattagttagccctaattgaaccataacaataagagcactagaaactaataatttatccgctaatggatctaaaaacttacccatatttgtcacaagttgccattttcttgctaaataaccatctaaaaaatcacttaaagaagctacaataaaaataatagcagcaataagttgctctattcttatgtcatatccacttaatacagatacacttccaaaaccaaagtttactagagcaaataatataaatactggaatcaaaatcactctaaaaactgtaatctggttaggtatattcattttaatacctcatttcttaatttatatgtatattatattaataatactgctaatacccacataataaaagtaataattataacaatactaatcataatcaataattgaataggttctttatttttagtacgatattcgggcacttcgttgtgtcgataatgatgtaaaagtgtatcgagttgattatgttgattaggaatttcttcatgatgcactttaatgagttgatttacatccatattaactacacttgcataacgtctaataaaaccttcagcgtaatccactttggcaagttgatcaaatttattctcttcaatatattttaacgtttctcgctttaattgtgtacgttgttctaattctgttaatgtcattcctaatctttctcttctaccttttaaggtttcaccaattgttttcacttttgacgcctccaccttcattactcaaaaaaaccgaagccaccgccaaacacatcttctccaaaatctaatgtgtttttgcttttaattgcttgttgtttaacttgttgtttcatgtgatcatattcaattttttgattctcatgttcacgtagctcgataatataatcaaaatcatcgatgctatattgatttgtttctataaataaatctggatgctcaactacttttattgacggtaaagtcatcacttcttcaactaactgttgatgtttaggatttgtttctctagcagttaccgcaccatcaataatataaacatgattagcatcatattcaccttttataagagaactacgaactgtctgtttaattaatgttgaacttataaatagccatcgtttatgcgcacagacactacctgcgacaatcgattctgtttttccaacacgaggcatccctctaatacctattaatttatgaccatcttctttaaataattctgctaaaaagtcgacaagtaaacctaaatcttcacgttcaaaacgaaatgtttttttgtcaccagcatcttgttcaatatagcgaccatgacgcactgctaaacgatcacgtaactctggaattcttaactttgttatttctatttctttcaattcatgaatgatattttcaaaacgtgtgactttttcaagactatctgtcttaataagtaatccacgacgcccttgatcaacaccatttatagtaataatactaattcctaacataccaagtaaactcgatacgtcgcctaaaagtccagcccgattaacaattatctcgtattctaaataccattccttttttttagcaacagtcatctaaccaaccccttgtttaaatacaatttgaaatattccccttatataattaaatttattatatcattgattataaaaaacgaatcgtcaaatctgcatttaaaatttaggatactttttaaatataccaaccaccattaaccttttggactgttcctgtaatactcttagcattaggatggcataaataagcacacacatgtgctacttcttgtggagctatcattctttgttgtggtagttcagataagataactgctttgtcttcatcactgaatgctttagccatacgtcctgaaacaaaaccaggtgctatagcattcacagtgacattcgtcaatgctagctcttgactgagggcctttacaaatccaatttgagcacttttcattgctgaataaatagtttccatacttgctcccgtctcgccccaaattgatgagataacaataattctaccatttgtactttttctcaataggtctatgaaatatcgacagcatcgaatcaactgtttgacatgaatatgataacattcatctatctctttatctttcatatcttgtagcatgccatataatgatgtaccactactataaattaaacagtctaactgttttatatgactaaatatatcatttaaatcaatatcatgagtcaaatccatttgaatgaattctacggcttcacctttatactttttttctaaggatgaaatatcagattgataatattgaagtactacttcatatccctcttttaataaacgatctacaatcgcactaccaatactaccagaaccaccaaatactaatgccttcatatttaatctatctccaaacggctatcaacaagacgatcaatatttagatattgtttagcagtttcattaatactatctaaagtaatattttctacaatatctaacatatcaaatacacttacaccctcaaaatacaattttgcatattgatttgcaatatattctggggaattcaaactagagataaattcaccaataaactgcttcttcaataattcaaacgcttctgaatcttttaagtttcctctatatttctttaattcagtaagtaacctatcctttaattgatctggttcatgagtagcacttgtaataattgagaaactataagtaggttcaagaacaaattgatatccaaatgaatcatcaattaaatcatcattaagaagagattgatagaaatctgtttcttcaccgaatacgagttcaaaaaataaagtcatttctaaatctctttgaacatatttctcaggtgcttcatccaaaggttcatttttaaaccctagcattaaacgtggagactgtaatttcattttttcagatataaatgattgaactacttcatttggttcttttattgctcctctttgaatagaaggttgatttgttttatgacgacgattttcatgttcttcaataacattacaaatacgtttaggatccacatctcctacgacaaataataccatattagatggatgataaaacgtttcataacataagtataaatcatctttagtgatactataaatactctcaacactacctgcaatatctactttaattggatgatgatgatacattgcacgtaatgtattgaacataattttatatcctggttgttcttgatacattttaatttcttcagcaataattcctttttctttgtctactgtttcttttgaaaaatagggtgtttccaccatatcaagtaaacgtagaatatttcgttcaacttgatcagttgcactaaacaaataactcgtgcgatcaaaacttgtaaatgcattgacttgagcattatcattggcaaatgcagtaaataaatcttcatcattgtctttttcaaataacttatgctctaaaaaatgtgctactccatctggtacagtcacatattgatctttatgatgaggtttaaatgtattatccaacgaaccgaattgagttgtataggtcacatatgttttttgaaatccttttttaggaattacaaataagcgtaatccattatttagttcatgtttatagacgcgttcatcaatcaattcataatattgttcttgcactatgattgacctcccttcgttaatacatatatcgtatctaaataggcttgatttgccattttaacgacatcttctttagtcactttattaactaattccatgtattctttatctgattgaggctgatttaaaagtagttgattttgcatgacttcaataatacctttaggtctatctgcaatttcttgtcgttgtgaaatgataatttttttagctaatgctaatttttcttcagagaaatctcctactttaaacttctcgaattcttcaataattgtagtttttgcaatatcgtatttttcaacagatacaccacttaatacaaataaatagccattttttccatctaattgcgaatgaatagaataagctagactttgtttttcacgtacttcattaaatagtactgaagaaggatcaccgccaaacatagtatttaatacgacaagtgcatagtaatcttcgtttccataatgagttggaaaacgataacctaaatttaatttagcttggtcaacggtatctttttcaatgattgtttcagtagattggtcggtacagtcagtatttacattatgattaaagtcaaacgtcgttgagctaagactaaatgaattttctatgagtgatgtaacttctttttcatttacatttcccactacatacactgaacacatgtcattatttatcatagatttatatgtatcatacaaactttcatttgtaatacgcgcaatattttctatttgacctatagctaaataacgataagcttcatttttgaacatatattttaataaattaataaatgaatattgcgctttattgtcaatcatcgcttctatttttttatgtaataatgatttttcttgagtaacaaatgtagagttgaatgaattattctcaacaagtggattcatgatgacttcttttaataaattcaaacctttttcaaataatggtgtagtatctttaagataatgttcatttacaatttctaaagaaatagtaatgacatgtttatctttaaatttagaaacaaagctattaatataagctccataaagctctgataattgtttattaaatgatttatctgttggccatttttttgtggcacgaaccaatactttacttagtaatgaacgagcagtaattgtttcgtaatcaagtggtgccataaatttaaatgtgatcatcgttgttttaaatttctcagttggaagaatatcaatatgtatttgatgattagtatattgtttcaaaataatcaatcactcctttacctgttattaaatttttgtgcgtgttaatttaaacttcactaggctactttttatataatttaatgagtataaaataggtttacccatttcatcataatggacaacctttaataacattaatccctcatgtggttcagcattcaatatgctagaaatatgaggttcataactgattgcttcaatttcagtttcagcagaagctaccttatgcccagtattaagttcaattgcattaagcatcgatccatcactttcttgatattcggtacaagttaaatgatgttcagcaatcttatctaaacaataaataactggatgatgattcgcagtacgtagtctttcaataattgttataggctgcttatcttcaatatctaacatttttgcatctaataaagaagcgggttgctgctctaaactcaaatattctgtacttgcttcatatcccgcttttttaatcatttcactaatactaaataatttatttaaaggataataaaagggctgtagagcctttatacttgttccttcttcaaaattatcagttaaaacttgttcaataataagttctccaatcgcttcatagacatcatctgttttaacgttaacttctctagcaatggataaattgctaggaagtttatcaccaggttttaaagaatgattttttatttttttaaaaatatattcttttactttaaaaactgagttcaattcagtcatactcacacctcttcattctcaaaatctattaaaacttgtcttggtttactgcctttttgtggaccaataacattatttctctctaaatcgtccattaatcttgatgcacgattatatccaattctgaattgtctttgtaaaagcgacgtacttgctttttgtttctcaattacaaaagcgtatgcatcatcatatagtgcatcttcacttttcatttctgatttctctacaggagcatcaggttccatttcttttacgtaatttgctttttgttgttcaactacataatttacaacttcttgtacttcttgatcacttaaaaatgcaccttgaacacgtgtctgtgtggattcaccattaccaacataaagcatgtcgcctttgcctaataatttctctgctcctccagagcctatgattgttctagagtctgtttgtgaacttacagcaaatgcaattcttgaagggatattatttttaataatccccgtgataacatctacagaaggacgttgtgttgctacaattaaatgtatacccgctgcacgggccatttgtgtaatacgctgtattgcattttcaacttcttttcctgccaccatcattaaatctgctaattcatcaacaatgacaacgatataaggaagttctgattgcttttcatcaagttcttcattttgacgtcttataaattgattgtatccttcaatgtttctagtagacgaatgttgaaataaatcgtaacgacgttccatttcagctacaattttctctaatgcctgtgatgctttatgaggatttgttactacaggtattaataaatgtggaacaccattatatacatttaattctaccattttaggatcaattaacattaattttacctcgtgtggcttagcgtttaataaaatgctcgtaataataccgttgatacatactgacttaccactgcctgtagaaccagccactaataagtgaggtgtttcattcaattcaatagtcattggttctccggagatgtctcgtcctaaaccgacttctaatttattttttgctggaaacttagattctaaaacttcttttagcgtaactaaagaaattttatcatttggaacctcaatgcctacagctgaacgtccaggtataggcgcttcaatacgaatgtccttcgcagcaagtgctaaagctatatcattatgtaaattaacgattttatttactttaacaccttgagctggttgaacttcatattgagtgacagccggtccaattttaatttgagtcactttagcattaactccaaaatttttcatggttgattctaatatttgacctttacgttgtacttcagctcttgaagttgtcgtttgttttgttggctgtttaagtaatgataaaggaggaatgtgataggctacattgccaacttctcctgcttctatgatcgaactattattcgtatcgtcatcattagaaacgtgttttattttatcttttttcatagaatttgacgcagacacatgcgtaggttctttatcttgatggtctatgtcaaattgacgttttttacgtttaggtcgtactttttcttcatccgttgctgcatgatggctatatataggaatatcttcatgttgctgtttcacttctgggaagtcactcacatctttcatgacttcatctttcctttgttgttcttctaattctctttggtgtgccaatgcttgacgctgttcttctttttcacgtaatcgttcttctcttctaattttatttgcttctcttttttcttttaaagtagatgaggcactctgagtagaacgtttaaaataatcaattgtgtttctcgccacatctctatgatgtaattttagtaataggataaagcttgatatcagtaaaatcaaagtcacaatgataatcccagcaatagagattaaaggtacaaataattttaataaataaaagcctataatacctccaccgaaatttggaaaatgagtatgttcataagatttatagacataagacaatatcggttctcttttcgcaacttctcctttagaaaaataataaatgagttgagaaacaatcagtaatacaaattgtaataaaatgagaccgaatgtacgacgtgtttttggaaaatgtctttgcattgcaatataaatcgtaattaaacttactaaaatatatgtaaggtaacgacttgcgccaaataaataattgaaaaagctatcaatcattctaccaacaagccctaattgaaatattcctaaaatagatataatcacaattacaatagcaataatataccttatagaactatctgttttttgttgctttttctttttagtttggcgtggtttcgttttcgtttttgaattggtttttctagtcgttgtttttttcttagttcgtggcaaatgttacaccttcttttatttttaattataataatgacattttcaaaaatataaaaaaatgtaagttatgttttagagttaaaagtatgaaagaggttgagacaatatgtatcacatagacctttaagcccattttaaaataattaaaaataaataagtcaaatcatcttttaaaattatagagttcactataaaagttagggtaaatgtcttatcttttatatactttcaatttaatacatcaatgaatctataaataagaatgataaacgtttatatttttaattattttataaaagtgatattgtcccgacctctttattaaatgtatatcttttaaatttcagaaataactggaataatcattgggcgacgttttgtactttcgaataaaagcttgctaatttggtcgcgcatattttgtttaatttcagaccactctatacgtttttcttgtagtccagcttccacaatttctcgaactttatcttccgcttcttgcattaattcttcactttcacgtacgtaaacgaatccgcgtgattgaatttcaggtccagcagctatacgtctatttttagggtctaatgttactactgcaataaagataccatcttctgcaagaagatgacgatctcttaacacaatatttccaacgtctcctacacctatgccatcgatgagaatattacctgaatttactttttcatttaataccatgtgtgagccatcgaaatgaatcacatcccctttttcgacaaggaaaatcttttcaggtgcaacgcctgcttcatttgctaattttgcatgcgcaatttgcattttaaattcaccttgaacaggaataaagtattcaggtttcataatattaatcatcatttttaattcttccatacaaccatgactagaggcatgaatttttttattatttggaataatatgtgcacctgctcgaacaagttcatttaacgtattggctataataacttccatatttgctgaagcagtgatggctaagtaaactgaatcgccctcttcaatatttaaaatcttatgtttatgttgggccatttgactcaacgcttcaataggttcgccttccatacctgttgctataataacgacttcatttttaggatagttttcaacttcattgattggaagcaataaatctttaggaatatcaaaatatcccattttgcgtgcagtattaaatgaactttcaagagattttcctaagaaagatactttacgatttaatttactagcaacattcaatacttgttgaattctaataaaattcgatgcatagcatgaaacaattaagcgtccttttactttagcaaatgcatcataaatatgcgattctatgacattttctggagtattataaccaggtttttctgcttcagttgaatcactaatcaaagcaaaaacaccttcttctccaatttcagccatgcgtttcatatcaggagcataatgcccttgtaaactttggtcaaatttaaattcacctgtatatacaattgaaccgtgtgaagtatgaatacagatacctaaactatctggaatactatgtgatgtattaaagaaagtaatattgacgtttttaaatctcatcactgaatcatgatttacagtataatatcgtacttttttctttatatttctttctttgatactttctttaactaaagctaaagtaagttttgatccataaattggtgcatcaacttgctctaaaatataactcactgcaccaattgcatgttcatgaccatgacttaaaaatatcccttttaatttatctttgttttctactacatattggatgtcaggaataacaatatctactcctaacatttcatcttcaggaaacattaatcctgcatctaacataaacatctcatcgtctacttcgacgatatacatatttttagcgatttcgcctacgcccccaagtggaataatgcgaatatcgtcattctttttctttactaaactcaaaatgttacctcctataattaattcccgtccatataaactcataatttattataatttaatttacgaaggatgtacactattaaagtgtgttgtaactaaggagtaaaagacctttaataaaaaaatatatactttcataaaatcattctttatatatataaagaaggttaggacttcattttgtcctaaccttaacttcattcacttattcatctaaaactttatgagacgcatttacacggccttgtttatcaatttctgtaattttaacttcaattgtatcaccgatttttaaaacgtcttcaactttatttattctatctttagaaatttgagaaatgtgtaataaagcatctttacctgggaataattctacaaaagcaccatatttttcaatacgcttaactttcgcatggtatacttggccaacttcagcttcgcgggtaatttcattaataatttctcgagctctatttatcatttcttgatcaacagcgccaataaagatagtgccatcttgttcaatatctaacttaacgccagtttcgtcaataatttcattaatttttttaccacctgggccaatgacatcacgaattttttcaggtttgatatgcataatttctaccttaggtgcatatgcacttaattcactacgtggttgatcgattgtttgtaacatatgatccataatcgctaaacgaccttgacgagcttgttcaagagcttcttcaatcacttcacgtgttaaaccatcaattttgatatccatttgaatcgcagtaattccctctttagttccagcaactttgaagtccatatcacctaaagcatcttccataccttgaatatcagttaaaattgtataactatcttcacgagtgacaagacccatagcaataccagctactggagctttaataggcacaccagcatccattaacgctaatgttgatccacaaattgaagcttgtgaagatgatccatttgactctaatacttcactcacaatacgaattgtgtaagggaactctgtagtgtcaggaatgatatatctaagcgctctttcacctagtgcaccatgaccaatttcacgacgacctggcgctctcactggacccgtttcacctactgagaaattagggaaattatagtggtgcataaaacgtttttcaatttcaggtcctaatccatcaataagttggtagtctcctaatgctcctaaagtaagtacagataatgcttgagtttgtccacgggtaaacaatccagaaccatgtgcacgtggtaataaaccaacttctgattcaagcggacgaatttcatctggtttacgtccatcaggtctaattttttcatctgcaattaatcgacgaacttcttcttttactaaatcatttaaaatcgcatatacttcatcgataagcaactcattttctggatccgcttcgtctacaaattcagtagcgatttctgctttaagtgcatctaaattttcatcacgttgttgtttgtcaaatgttaatacagtttcttttaatcctttttcttccgttaaagattttactcgttgtactaattcttcatcacgttcaacaggaataaattctttttttacaggttgaatatgctcaacaacttcttcttggaaagcaactaagcgttttatctcttcatgaccaaagaaaatcgcttcaagcatttcttgttctgtaatttcactcgcacctgcttcaaccatatttacagcatctttatgaccagcaacttctaaatctaaacgagatacttctttttgttcaagtgttggattaatcacgtattttccatcaatatatcctacatttacaccggcaattggtccttggaatggaatatcagacacgctcaatgccattgacgatccaatcattgctgccatttctggggagcagtctggatccgcacttaatacagtattcataatttgaacgtcatgtcgataacctttagggaataatggtctaattggtctatcaattaaacgtgcagtaagtgtcgcttcatctccaggacgaccttcgcgttttttaaatccacctggaattttaccagccgcatacattttttcttcatagttaactgttaaggggaaaaaatcaccatcacgtggctctttagaagcaactgctgtagataatacaacagtatcaccataacgtactaaaactgcaccattagcttgtttcgctaattgacctgtctcaatcgttaacgatcttccagcccattcagttttgaacactttcttttcttgagacattatgaatctcctctctgaaatctaatacttacatcatatcatttatttatatatttttatattagtgtttatgataaaaatacaaaaaaaggaaagtaccaatctaaatggtgctttcccttcaatatatttaaaattaacgacgaatacctaatgatttaattaattcacggtaacgttgaatatctttactacgtaagtagtttaataagtgtctacgacgaccaaccatttttaataatccacgacgtgaatggtgatcttttttgtgttcacgtaagtgttcgtttaatgcagagatttctgcagttaaaacagcgatttgtacttctggtgaaccagtatctgtttcgtgtacacgatattctttaataatttcatttttacgttcttgagtaatagccataattaaattcctcctaatttttgtttacaccttaatctgagcaaggcgtcggagtttcaacctgccaagataaaggattcaatagtaataagtttttcgaaaactcaactttagatattatacgatacatcatcaccaaaatcaactgctaaaagatattttgcacgttctttatcgtcattcatttgacttactaaagcatctataccatcaaattttacctctggtcttaaataatggtgccaatatacgattacacgttctccataaatattttcttcaaaatcaaaaatatttacttctatcaccacttctgctttagatggatcgtgaaatgtcggcttaacacctacgttagctaccccacgatatattttgtgttcggcacctatttcaatacttaccgcatataccccttttttaggaaggacataatcatcgctaggttggacattagctgttggaaaaccgattgttcgacctcttttttctccttgaacaactgtgcctttaattcgatataaataccctaattcatcattagctttttgtagattgccttcatgtaacgcttgtctaattgatgttgttgaaattttttcagaatctaaatctaatttaccgactattgtagtattaaattcatctatttcatttaacacggccatatttcctttaccaaatttaccaaatgtaaaatcaaatccagcaacaacttctttaacatgattattaataatatagtctttgataaactcttcagctgtgacgttagcgaaacgtgatgagaaattgataacaatacaataatcaatatcatgctgttctatcatttctaatttatcagatagtggcgttaagtaatctgtacgtttacgttcaggatttaatactactgatggatgcggatcaaatgttgttactgccttttttaaatttttttcttttgcacgtatatctaatgcttcaaatactttactgtgaccacgatgcataccatcaaaaaaaccaaatgccattgcaacatcttcttttatgagttgttcattttgtattggatgtgttatttctatcactttcatatcaatcaaaggctcctttaattaaatacttttttaggctttatttcgttaattttgtcaggatgatgttcataaatggctaatgctttttcacttatcttatcaataaatacaaattgcttttctaatgatagagtaaaatctttttttaggagtttttgaccatttaagattctatactttaaagtgtcatcatcaatgactacatattgtaaacttttcaaaccatattctataggaaatagataatgttgtaatgtttcatgctcatgtaattcagaaattttttcaagtgataaactttcatttatattaaatccacccgaatttatacgagttaacaacgacatatgagcaggatagcctaaagctttgccaatatctgttgctaacgttctgatataggtaccttttccacacgttacttttatatcaaaatgacatgtttgttctataaatgttaaatcagatattcgttcaatttcatcaattttaacttgtcgttttggccgttcaatagtttctccttttctagcatattcatataatttttttccatttacttttacagaggaatacattggaggaatctgctctattactcctttaaattcttctaaaacacgatcaacttctatagaagtaatcgtattcgatgatatatttactttttctattacttctccagtttgatcttcagttgtcgtactttcacctaatgtaatggttgcttgataagatttccccatatccatgacatagtcgcttactcttgttgctgtccctatacagataggtagtacacctgaaacttcaggatctaatgttccagtatgacctatctttttagtttttaagatttttctaagtttaaatacaacatcatgactggtcaaaccacgttctttatacactggtaatataccgttgtacattttttcacaccctttagtttattatgtctcactatgtattattaaatcatttaatgtcttatccatattttatcagtattaatcatataaaaaggagtaggactgaattcatgtaaatgttatcgtcctacccccattatatgttgcatctaaacttctttttctgaagttatttgattgaatgtcactgattaataacaatgataaagtattatttatcttgtttgtgtaaatcttgaatcattttttcaattttattaccgtattcaattgattcatcatattcaaagaataactctggtactatacgtaatctcattcttgaacctagctcagatttaatgaatccttttgctttatctaaagctttaaacgtatcattaacttccttcttattgccaagcactgttaagaaaactttggcttgtgataaatcatttgttaattcaacgtcagtaatagtaataaatcctactcttggatcttttactttattattaatgatatccataacttcttttttcatttgttcgccaacacgttcagctctcatattactcatggatatgtcacctctttattatttaacatatgattagaagagaatgctaaagtgcctacctatatcatatacactttagcctcttacaaattagttatctttcaatttctaccatttcgaatgcttcaataatgtcgccttctttaatgtcattaaagtttgcaattgtaataccacattcgtaaccttgtgatacttctttagcgtcatctttaaatcgttttaacgtatcaagttcaccttcgaattgaacaataccatcacgaatgacacgtacgcctgcgttacgagtgattttaccttcagtcacgtaactaccagcaatggttccaacttttgaaactttgaatgtttgacgtacttcagcttgtccgataacttgttcttcaaattcaggatctaataaacctttcatcgctgattcaatttcttctataacattatagatgactctatgaagacgcatatcaacattttcagcttctgctgcacgtttcgcacctgcatcaggacgtacgttaaatccaacaataataccatttgaagcattagctaatgtaacatctgattcattgattgctcctacagctgtatgaataatacgaacatttacgccttcaacatcaattttcataagagatgcagctaaagcttctacagaaccttgtacatcacctttaataatgacattaagatctttcatttctccttgtttcatttgttcgaataaattgtctaatgaaacatttttgctttcttgacgttgttgaatcacacttgcttcatgacgagcttcaccaatacgacgcgcttgtttttcatctttgaaaataacgaagcgatcacctgcttgaggtacatcgttaataccagtaatttcaaccggtgtagaagggccagctgttttaattctttgacccaaatcatttaccatagctcttacgcgaccatacgtattaccaactacaattgaatcacctacatgcaacgtaccattttgaactaataatgacgcagctggtccacgtgatttatctaattctgcttcaataacagtacctactgcttgcttatcaggattagcttttaattcttgtacttcggcaactaaaccaatcatttctaataagtcatcaataccatcaccatttaatgctgaaagtggtacaaagattgtgtcgccaccccaatcttctggaattaaaccatattcagttaactcttgcatcactcggtctggatttgcagttggtttatcaactttgttgaccgcaacaattgttggtacatccgcttctttagcatggttaattgcttcaattgtttgaggcataacgccatcatctgctgctactactaaaatagtgatatctgttacttgagcaccacgtgcacgcattgttgtgaaagctgcatgtccaggtgtatctaagaaagtaatttttttaccattattttcaatttgatatgcaccaatgtgttgtgtgataccgcctgcttctcctgctgtgactttagtatttctaattgagtctagtaatgttgttttaccatggtcaacgtgtcccataattgttacaactgctggtcgttcaattgcatctggatcgtcttcttcatcatcaaaataagttgttaggtcttcttcattaacaacaacttctttttcaatttcaacaccataatcatctgcgataagttctaatgtttcttcatctaatgattggttaatattagcaacaatacctaacaagaataattttttaataatgccagatgattcgatatttaatttatcagcaagttctcctactgtaataccttcctcatacgtgatttttgaaggcatttctttaggttcagcagcagatttgttattcttacctttattattatttttgttgtttttattgtttttgctatttttattgttttttttctttgaattagatttgttttgattattatcttttttactttgttgtttttggtgattattttgagtgttttgttttttattttcttcattttgtgatgatttgaactttttatcaagcatcttaatttggtcatcttctaatgcttgcatgtgattggatacttcaacgtccattttctttaactcatctataatctctttacttttaacatttaattctttcgcatattcgtaaattctctttttactcatataatcactccttacaatattcatcaatcatcgacataagttttttagcaaaacctgaatctgtcacgccaacatttacacgttcttctttgcccaatgattgtcctaattctactctcgtaccgaaaactctaaacggaacatgatatgtgtcacatttattctttatattctttttagcgttatctgaagcatcagtagataaaatcacaagtttaatattacgtttttttatctcagatatgagtactgattctccaactttaacttttctagctctcatcgctaagcctaaaaaattaaatatctgttcttttatcatttaggaatctcttctctataaattaatcgaattacttctttatatacaggatctaatttttcaggactttcattaaagtacttctcgagtacaccatttttttgagcaccttctacgcttttaacatcttttgaaacatatgcacctctaccttgttgttttccagtaccatcagcgaaaatttcgccttctttattaattactactcgaatcatgtcttttttaggacgcatttcattcgtgatgatgcatttgcgcattggaattttcttcttcttcatttactactcaccccatatgcttaaacgtattaatgttcttctttattatctgaagcgtcttgtgcttcatttgaagtttcatcaacttccgctgataattcagctgttgttaagtttgtttcttctaaatttatgtcatcaatttcaatatctttatcttcagaaaatactatttcatcagctttttcttcagattcaattacaggataaatccctgcttcgcgagcatctgtttcagatttaatatcaattttccatcctgtaagtttggcagctaagcgcgcattttgtccacgtttaccaatagctaatgataattgataatcaggtactaccactacagtagattggttatcttcatcaacaataacttctaaaacttgtgatgggcttaaagcattacgtacaaaaacgtttggatcttcatcccattgaacaatatcgattttttctccacctaattcttcaacaaccgcttcaacacgtgaaccttttgcacctacacaagctcccactgcatctatatctggattttcagagtatacactaattttagaacgatctcctgcttcacgtgcaactgatttcacaataacagttccatcataaatttctggaacttcttgttcaaataaacgttttaataaacccggatgacttcttgacacataaatttgtggaccttttgttgtttgctctactttattaacatagactttaattctttcatttggaatgtatgtctcattaggacttctttcagcttcagataaaaccgcttcgattctacctaaattaacatacacatatcgatgatcaacacgatcaatcacacctgttaaaatatcttcttctttatcaataaactcagagtataaaatttctctttcagcatctcttagacgttgcattactgcttgtttagcagcctgtgcgcccacacgaccaaagtctttaggtgtgacatcttcttcgtaaatatcacctatttcataagcaggatttttaactaaagctgtgcttaaatcaacttcttcacgatcatcaaatacttcttctacaacttctttacgtgcgatgactttaaatgtgccttcatccatatttaattctacacggacgtttctagcactatcataatttttcttatatgcagtaattaaagctgcttcaattgcatcaatcaaaacttctcttggaattttcttttccttttctaagtattcagttgctaataataattcattacttgccacaattattcctcctcatcacgttaaatcattacagcgtgacgtgcttttgcaattttatttcttggtatctcaattgtttttttctttgctttttctttaacttccatagttattgtgtcatcatcgacagacttcagaatgcctaaccattctttatcaccttcaattggcgcataaagagatacaaatataggttgctctatcgcattttgataatctttttctttttttagtggacgttcagctccaggtgaagctacatcaagataatacatttcaggaataggatcattttgatccattgcttcacttattttttcagaagcaagcgtacaatcatttaaatccacgccaccttctttatcaatagagattctcaaaaaacgatctttgccttcttttgcatattcaacatcaactaattcaaagtttaaatcatctaaaatgggagtaatgatagtttctacttcttcagtaattttactcatacaggcctccttttttggcaaatagaaaagagcgggtatatgcccactctttctgcctgagtctaaatttttacacaaactaattataacatactttatatgcttaaacaaatgaagctactattaatacttctaagttgtccatttacatatcaaaaatggacaattgtgctttatctggtaaatctggtaatgaacccaaatcatcaaggtattcaataattttttgagataaacctgcttttttattaaggtcttctttggataaaaatggaccgtcttcacgtgcctcaacaatacgtttagctacgttttcacctaatcctggcacagcaataaatggtgggatcaatgtatcatcttcaataatgaaatcaaaagcttgacttttttctaagctaatcggctgcattttaaatccacgatgtgccatttcattcattatttctaatactgttaatacatctttttctttttttcctaaatccatataacgagaatacatatctttaactgtgttcttaatactttctttatctttaatcattgtaattaaatcaaagtctgatgcacgaattgtaaaatatgctgcataatagtataacggatgatgcactttaaagtatgcaatacgtacagccataagtacgtaagcagctgcgtgagctttagggaacatgtatttaatttttaagcatgaatctaaataccaatcaggtacatcattcgctttcatcgcatctatcatttcatccgtaagtcctttacctttacgaacagactccattgttttgaaggccattgatggttcaagcccagcatacataagatataccataatatcgtcacgacaaccaattacactggataaatcgcagatgcctgagcgaattaactcttgtgcattaccaagccacacatcggtaccatgtgataaacctgaaatttgtacaagttcagaaaatgttgttggcttagtgtcttctaacatttgacgaacgaaacctgtaccaaattcaggtacaccaaatgtgcctgtcttacataaaatatcctcttctgttacacctaaagaagccggactactaaatatttgcattgtctccttatcatcaacaggaatcgttttaggatcgatacccgataaatcctgtaacatccgtatcattgtaggatcatcgtgtccaagtatatcgagttttaacacattatcatgaatcgagtggaaatcaaagtgtgtggtcatccaagatgcactttgatcatctgctggatattgtatcggtgtaaaatcataaatatccatataatcaggaactacaataattcctcctggatgctgtccagttgtacgtttaacacctgtacatcctttgacaagtctatcgatttccgcaccacgtttatgaataccttgatcatttagatatcctttaacgaagccaaatgccgttttttcagccactgtaccaattgtacctgctcggaatactttatcttctccaaaaagtactttcgtatagttatgggcatgcggttgatattcaccactaaagttcaagtcaatatctggtactttatctcctttaaatcctaagaaagtctcaaatggaatatcttgaccttctttaattaattcgccaccacatgtttcacatgttttatcaggtaagtcgaatcctgaacctaccgacccatcatcaaaaaattcactcgtcttacaatgtggacatatatagtgtggagggagcggattcacttctgttatctctgtcatcgttgcaacaaagctcgaacctacagaaccacgtgaccctaccaaatatccatcatctaatgactttttaactaaccgttgtgatatgagatagataactgaaaagccattaccaataatactatctaattctttttcgagacgatcaatgacaatttgcggtaagtcatcaccatacaattttttcgcatttgtatagcttaattcacgtatttcttcgttagcgccctccatacgtggcgtaaataattgatctttaattggaattactttctcaattcggtctgctaattcattcgtatttttaacaacaatatcataggctttatcttctcctaaaaaatgaaattcatctaacatttcatctgttgttctaaaatgtgcttctggaagtgtggaacgatttaatggattacctggttgtgatgcaattaaaattttacgagcaatagcatcatgctcaaataagtaatgagcattaccagtagctatcacaggtattcctgtactttctcctgcttttaaaatacgatcatatatttcatacaatgtttcagtatcacgaattaattcacgatcaattaaatcttgataaagtttaggtggttgtacttctataaaatcataatactttgctattttttcaacttcagattgatcacgttgcatcacagctgtaaataattccccttcatcacaagctgtacctactagaatgccttctcgatattcatttaataatgatcgtggaattctaggtgttctataataatattttactaaagaagcacttacgattttaaataaattcttgagtccatcttgattttgaactatgagtgtgacatgggttggtcgtgcacgtttataggcatcttcatttgataattttttattaatatctttatgattagtcacacctagttctttcatctgttgaaccattttaatgaaaatataagctgttgcttcagtatcataaatcgctctatggtgttgagtaagttcaacgccatattttttagctaagaaatttaatccatgtttaccatattcagtgttaatggtacgtgataattcaagagtatcaatcactccattagttgatggaccgaaacctaatcgttcgtaccctgtatcaataaagcccatatcgaatgaagcattatgcgctacaaaaatggcatctcctacccattccttaaattctgttagtacttcttcaatttctggtgcatccactagcatgtcatctgtaatgtgtgtcagattaattattgtttctgataatttttcatgtggattactaaatctttcaaatttatctataatttcgccgtctttaactttgacagcagcaagttcgataatttgatcatattgattagataaacctgttgtttcgacgtcaaacactacatatgtagcttcttttaaatttctatcagtaggtttataggcaataggcacaccatcatcgactaacatgccttccatcccgtaaatcattttaattccatttttttccgctgcactatgagcatcaggaaaagcttgaaccacattatgatcagtaacagctattgctttatgtccccatgctgcagcctgattaacgtacgcactgatgtttggaataccatccatttgactcattgatgaatgtaaatgaaattcgacacgtttctcttctgctttatcttgtttaggtgtctttttgatttcttcaatatctgacatcatcatgactaaatcacgtacaaacgtatcttcttctatacgaccttgtgcacgtacccatttacctacacttaaggctttaaagtgatttaaatcatccttattttttctagtaaacatttttaatactaaagaatctgtatagtctgtcactttaagttcaacaatgtgacgtccactttttagttctttaatgttaatatcaaagataaccccttcaatggctactttaaattcttcttcaataattgtttcaataggtttaatattttcaacgtgaattggctttcctatttgacatttttcaacactactgccgttattatcttgttgttttgctttttcagcttttattttttcaattttttctgtagcttctttagcactttgttgatcttcttcttgaatatgtgcctctaatgaagcaagatcttcatctctattcgaatcatcagtttcaaatattactttatctatatcaaagccacatttttgaaatgcttttactaaactaccattacatactttatcaaaatgatttctttcaatatcatttgaagtcattacttttaaaacattacctgacataattaaacgtttttgtttaagttgacccttcacttttggtgataaagctgtgtgttcaatacaatgtccaaaatatttaatcacatgttcatcttgattcgatgtattttgaattgtaaaatgccagtccacatgtgcaatatctttaaactcttctttaattgcatgagtaaagattaaataatcttcatttgaaagaaaataaggtaacgtaatctgaaattcccaacttctatttttatttgatacatctattcgtgtgagttcacctttttcaagtatttctttatccaattgatttgaaatcttaatttgatcggcaagtactctaaatttttcctgacttgtcattgccacaaagaataaccaccttatttcgaacttatcatttactttaaaaaacttgatttatattatactactttcacatttatttttcatgattacagtttaactaataaaaacaataaaagaggttggaaacaacaaaatgttccaaccatttttattcatgtgcacctatagtttttcatagagtgaagcaatgtgattgtctaattcattaacatgaacttcttcactttcacccgtttgacgcactttaacttcaacaataccttcacttgcatttttacctacaacaattcttatcggtaaaccaattaaatcagcgtcattaaatttaacgcctgcacgctctttacgatcatcataaagtacatcatatttagattgtaattctgagtataatttatctcctaattcaagttgttcttcttttttaggattgattgtaattaaatgtaaatcaaatggagtgactgactttggccaaataataccattttcatcattattttgctcaacaatcgcacttaatgttctagacactccgataccatagcaacccataattaaaggttgcgctttaccttgattatctaaaaatttagcattcattgcttcagaatatttcgttcccagtttaaatacttgtccaacttcaataccttctgcaaattttgcatttccagaaccatcacttaacggttcaccttctaaaataaatctaaagtctccgtattcatcgatattaaaatcacgctcaacatttgcattaatatagtgatagccatcttcattagcacctaccactatgttatttaaatctttaacaaaattatcagcaataattttaatgtctttattatgaataggtcctaatgaaccaggatttgctccaagtaaatttacaatttcatcttgagtcgccatttccacattatcagtttcaaagtatgctttcaccttcacatcattgagctcgtgatggcctcttactaagaacatcatgaattctccatccactttgaaaatcattgtttttacaatttcatcaattggacgatttaaaaagtcagccaattcttgagctgttttaatatttggcgtttctattttttctagtgatttaatgtctgtatgtttctcatttggataatacttaacttcagctttttcaatatttgctgcataatcactattttcactatacacaatcgtatcttcaccaatttcacttaaagccataaattcatgtgtatgattaccgccaatagcacctgaatcagctactactggacgcgcattaattccaacacgtttaaaaatacgactataagcattgtacatctcttgatatgtttgatctaatgatgcttcatcagcatggaaagaataagcatctttcatgatgaactctcttccacgtaataaaccaaaacgtggacgtttttcatcacggaacttagattgaatttggaataatgttaatggtaattgtttataagactttaattcgtctctaacgatagaagtcactacttcttcgtgagtaggtcctaaagcaaattctcttccattacggtcttttaatcgcattaattcaggaccataagcgccccaacgtcccgactcttcccaaagttctgcttgctgcaatgctggcattaaaatctcaactgcatcaatattttccatttcttcacgaatgattttagaaatatgatttagtacacgtgttgctaagggtaaataactataaataccacttgtgctttgtttaattaaacctgcttttaataacaactgatgacttaaagcctcagcttcagaagggacttctctcattgttggtataaagactttcgattgtttcattttttatcctcctaaattataagaaataacgttgtatatcattccaagtgactaagaccataataatcactacaaatatagctccaacagcaataattgcagtttcagcttttttgtttactggtcttctaaatatcgcttcataaataacaaataaaattctaccaccatctaaagctggaataggtaataagttcataatccctaagttaacactcagcaatgccgtatagtatgttaatgcaataataccttgttttactacagaatctacattgtgataaatacccactggaccatttaacatgtcaaaagtaaagccacctgtaaaaatacttccaatcatcgttccaactgctttaaaaataagtacacttttatcaaaaaattgttgtacgcctaatgctaatggcttaaatagtgaatgttcattcgcaggttgaaaacctaatacataagaagttatagaatttaattttgtttgtttaatcacttgttttttaggtgtaacatctagtgatttggtgtgaccatctcgtacaattttaattgttgtttgatggtctttcgttttattaagtgcactttgaatatcgctaaaatcgttaattttatagtgtccaacttgaacaattttatctccagcttttaatccagcttcttgtgctggataattgtctgctaattgttttactgtaggggtaggcgtaccttgataataagctaagccaataaatagtacgagagctaaaataaagttaaataatgggcccgcaaataaagttaaaaacttaggtaatggttttttatgtgtaaattgacgatgccttggtgcaatttgaattaaactaccattttcaacaaagtaagcttttttagcaatattaaaatgatgtctttcattatcatatgctgtaataccttcaatatataaatcatctttaaaatcacatcgtttaacttcaatcgcttcaattttttggaatttatgttgatcatctaaaataatatgtgtaatttcatcttgttcatttagttttattttaacattcattcctggctgaacgggtggttcttctaatccatctcctgccattcttacatacccaccaactggaagtaaacgtattgtatataacgtttcatctttacggaaactgaaaattttgggtcccattccaatcgcaaattctggacacataatacctgcacgttttgcaaaaaacatatgtccatattcatgtactgtaacgagtacaccaaatacgataataaatgagacgattgtgattaaataactcacttacaacacctcaattaattttaatatttaaattatctagattataagattttagattttaaattttataataatttctagtataaaaaaacagttttaaaaaaagagctataaagtacacgattgtataatattaatcaaatgtgaactcaataactcctcaattatatcattatatgcttttcataaataaataaaacgttaattttttattacatttgtagtaatagaatgtttaacagtggtaaaacaaacataaagctatcaaatctatctaaaataccgccatgtcctggcaagattctgcctgaatctttaacaccaaaatgacgtttaaaaccagattctactaagtcacctaattgaccaaatacacttaaaataattgtaattaataataacagccaaatatttagatgaaaatctacaaaaaacatcattacaagtggaacaattaaactacaaatgagtcctccaataaaaccttcaatcgttttgtttggactaataactggccatagtttgtgttttcccattaatcgtccaaatatatatgcgccagtatctgttaaccatacgattaaaaatgcaaaaagtatataatgtaaaccataagaacgtgtagcataaaaatacataaatcctattccaacgtatgctacagacattaaacaaaatgcagcgtccataaagctaaatctgtttttcgaaagtacagtataacttaatagtatgaagctcattgcaattaaactttttaattgaacatcactcacccaatctccggaagactgaggaagcataataataataagcgctatagcactgaaaatacctggaattgataaaaatttaatcatattcatatttaacaattcttttaaagcaatgagcgccagcaaataagcaaaaagcattaaaatagttccaccttttaataatataggtagaaaaataagcaatgctataatcgcggtcaatgttcttactttcataaattactcctcacttaatcctccaaaacgtctttggcgagattgatatatttttatacattgttttaattcttcaccatcaaagtctggccataacttctcattaaaaataaattcactatacgaagcctgccaaattaagaagttactaaggcgttgttctccagatgtacgtattaataaatctggatctggatatggatgggtcattaaatgtttggaaatcatcaattcatcaatatcatcactgttttgaccattacgttgaagttcatcataaattgatttcatactttgaacaagttcagctcgtccaccataattaatggcaaatactaatttcaagcctgtattatttttggttttttctttagcataattaatcgcctcaattgttgattggggtactgcatctaaaaaaccaatagtttctatcttaacatttttctctacaagttctggtagaaatgtttttaaaaaattcacaggtaaattcatgatataattaacttcactttcaggtcttgaccaattttccgttgaaaaagcgtataaagttaaatatttaatacctaaatgacttgcttcacgtgtcactttttttatggtttgcataccttcatagtgacctttaattctaggcattttacgcttttttgcccaacgaccatttccgtccatgataattgctatatgttcaggtaaattatgtatatctaaatcatcattttgattgattttagtcttatttctttttattagctttctaaacatggtctttcctccgagcctgatcatttctgttatattatataggttatttaagaaatcatctatcattttatcatactaaataatggcattgaataagcaaattaaaaaactgtaccaaagtctgacttggcacagtttagactaaaacaatttataatcttgtcatagaagagtatgatgaaatattaaacagacataatatctttttctttttcatcaactaaattatcaatttctttaattgaattgtctgttactttttgaacatcttctgtttggcttcttaaatcatcttcagtaatgtctccatttttttcgtcttttttcaattgatcattgatatcacgacgaatattacggattgaaacttttgaatcttcaccgatttttttaacatttttaactaattctttacggcgttcttcagttaaagcaggaacagtgatacgaataacttcaccgtcactagtagggttcacacctaggttagcagcaataatcgctttttcaatatcagctacagatgatttatcatatggagaaatgacaagtaagcgtgcttcaggcacgtttatactcgctaactgttgaactggtgttggcgcaccataataatcaacatttactccatttaataaattagaattcgctctacctgcactaatattagctaattcacgtgataaattttcaattgattttttcattctagattttgtatcttgaattatctcactcatacatttacacctctaattatttagtaattaatgtaccaattttttcgcccataacggcacgtttaatattgccttcttccataatagagaatacatttaatggaatgttattatccatacagaatgaagaagcagttgaatccataacttgtaggccttcttgtaacatttgaatatgtgttagatgatcatattttacagcatttttatcaatttttggatcggcagaatacacaccatcaacattatttttacccattaaaatgacatcggcctctacttcagctgcacgtagtgctgcagttgtgtcagtagagaagtatggattaccaataccagctgcaaaaataactacgcgttttttctctaaatgtctaattgcgcgacgacgaatataaggctcagcaacctgtttcatttcaattgaagttaatactcgtgtatcacaatctaattgctctaaactatcttgtaatgccaatgcattcattacagtagcaagcatgcccatataatcagctgtaccacggtccatgcctaaatcgctacctgttttacctctccaaatattaccgccaccaacgataaccgctatttcacaatccattttagctacttcagcgacttgttttgctacacttttaatgatgataggattgataccaaaacctttttcacctgcaagtgcttcaccactaagtttcagtactacacgtttatatttagaagtctgcgccattattttttcctctctatgattaatgatatgtaatatatacaagtaaagaagacactaatggtcttctataataaaagaattttattatatagaattccttaaaggtgtcttctttcttgttagaataatgtgaacaaattatttcatttgacctttaacttcatcagcaaagttttcttcgcgtttttccataccttcgcctacttcataacgtacgaagtcagctaatttaccgcctttagattttaagaaagcttctactgtttgatctgggtctttaacgaagttttggtcaacagcacaaatttcttgaagatatttacgtaaacgaccttcaaccattttttcaacgatattttcaggtttaccttcatttaatgcttgttgttttaatacttctctttcgtgattaatttcttcgtcacttacttgatctgaagaaacatatttaggattaattgcagcgatgtgcattgctacatctttagctgcttcttcatcagtagaaccttcaacaacagtcaatacaccgatacgtccacccatgtgtaagtatgcaccaaaagcatcgttatcagatttagttctaatagcaaaacgacggatgcttaatttttcaccgattgttgagatagcctctttcattctttcatcaactgtttgaccacttgctaatttagtttctaataaagcttctactgtttcagctttactttcaaggatttgattagcaatttctttaactaattcttggaatccttcgtttcgagcaacgaaatcagtttcagagttaatttcaacgattgctgcttcattaccttttacttctacatgtactaaaccttcagcagcgattcgatcagcttttttagctgctttagcaatacctttttcacgtaagtagtcgattgctttatcgatatctccatcagtttcagttagcgcttttttacaatccatcatacctgcgccagttctttcacgtaattctttaacaagttttgctgaaattgccattaattattcctccaatatgtctaattgtaataatagatgatatttaaatattaccattaaaggtactattatttccaatactctattacgatttattaataattttttaaattaaggttattttaaaaaaagggcgataagcattacatcttatcacccatttaactatatcttagtttgattcaacagtagtattttcttcagttgattctgctttttgagtttcttcactttcatctaaatcgatgttttgttctgcagctacttcatcgtttgaaataccttgttgaccttctaagacagcgtcagccattttaccagttaataatttaacggcacgaatagcatcatcattcgctgggataacatagtcgatttcatcaggatcacagttagtgtcaacgataccaacgatagggatatttaatttacgtgcttcagcaatcgcattgcgctctttacgagggtcaactacgaataatgcttgaggcatagatttcatatcacgaataccgcctaagaatttgattaaacggtcatattcttttttaagttcaacaacttcttttttaggtaaaacgtcaaataaaccgtcttcttccattttttcaatttcagaaatacgtttaatacgttttgagattgttttataattagttaagattccacctaaccatctttggttaacgtagaattgaccagcacgttctgcttcagctttaactgattcttgtgcttgttttttagtacctacgaataagactttaccgccatcttcagatacttgttttaagaagttataagcttcttcaactttttttactgttttttgtaagtcaatgatataaataccatttctttcagtaaagatatattttttcatttttgggttccaacggcgtgtttggtgaccgaagtgaacaccggcttctagtaattgtttcattgaaattactgccatgttaaattcctcctattggttaattacctccatagtaaactaatataaagacaatacttaagactgcaccctttatatttacattcactacgtgtgtattggctttatagccgtcaataataatatcatatctagaatcattacgcaacattttttaactgtgtaaaataaaaaactactatcttaattttaatagatagatagtagttttaaaaaatatttattcacttcgattaagttcatctaagaatttttcttttttaactttaataaatgtacctttcatgccaagcgatcgtgattctattacaccagcactttctaatttacgtaacgcatttacaattacagaacgtgtaatacctactctatctgctactttagatgcaattaatagaccttcattaccaccaagttcctcaaaaatatgttcaatcgcttctttttcagaataagataatgaattgattgccattgtaatagcagctttatcacgtgcttctttctcaacttcattatgtttctcacgtaaaatttccataccaataacagttgcagcgtattcgccaagcactaaatcattttcattaaagtcatctttaactcttcctagaatcagtgtacctaagcgttcgcctccccctaaaatcgggaagatggttgttctactattaataaatacatctctgtgttctggagggaatactgtcaagtctgaatcaatatcaatattcgcttcagtttgttgaacttgcataagtagttcagtgtattcacttggaatatgtttactttcagtcaacatattactaattcgttcactctttaaaagttcatttaaacttgaacctaaaattttacctctacgagaaacgatgaagacatttgtaacagttacattactaatagtctgagcaacatctttaaagtctaccgcaatgcctttatgtttttgtaataatgtatttaattctctagttttagataataagctcataaaatttctcctttatttatattataaaataaatgcacttaaatctttgtttgttgaaatagatttcaacttatcatcaacatactgtggtgttatatctactactgcatttggcatatttggtgcttcaaaagataaatcttctaacattttttctaaaatagtgtgtaatcgacgtgcaccaatattgtctgtatcttgattcacttgatatgccatttcagctaatcgtgttatcgcttcatcagagaagttgaccgtaacttcttcagtttttaacagtgcttcatactgctttataagagataacttaggttcagtcaatattctatagaaatcattgactgttaagctttcaagttcaactcgaattggaaaacgcccttgtaactcaggaatcaagtcacttggtttagaaacatggaaagcgccagcaccaataaatagcatgtgctcagtatttacagtaccatacttagtttgaatcatgctaccttcaaggattggtaatatatctctttgaacaccttgtcttgatacatcttgaccactattggaattgtttgtagcgactttatcaatctcatcgataaagataattcccatttgttctgctaattctaaagcttcttgattagcagtttcttgatcaattaattcatctgcaaaatcatcagtaagaattttacgtgctgtttttactggtacttctctttctacttttcgtttaggcatcaattgattcatcatatcttgcatttgttgattttgactcgtgcctaacattcctaatgcgccagggtcttgttcaactttgattctaactttttcttcttctagcttacctgctaaaagttgttgtcttatttctgaccgttttgttttgatttcttctgtaggggcttcttcttcctcgtcattctgattaaaattaggaatagcaccacctaaaagagattcaagtggattattattttgagctgcttttttcttcatactaggaacaagtaattttactaatttttcattagctttttgtgttgcttcatcttcaactaatgatttcttttgctcttttacgagtcttacagacacgtccaccaagtctctaaccatactttctacatcacgtccaacatatccaacttcagtgaattttgtagcttctactttaatgaatggtgcacctacgacttttgccatacggcgtgcaatttctgttttacctacaccagttgggccaatcattaaaatatttttgggtgcaatttcttgcttagtttcttcatcaagaagacttcttctgtatctatttcttaacgcgattgctactttacgttttgcatcttcttgacctacaatatattcgtccaatttagatacgatatctttaggtgttaattttataccgtttgcatccatttactattacctccaccttaatgtatgtccatatcaattcatttccgttttgtttatatatgttatttataaagtctcaacaataatattatcatttgtaaatacacaaatatctgaagccacttttaagctttcatatgccatttctttagcagtcatatgtgaagcatgacgtttaagtgctcttcctgcacttaatgcatagtttcctcctgaaccaatagcgattaaatcatcgtcaggcgcaatgacttcacctgtaccacttaccactaaaataccatctttatccattacgataagcatggcttccagttgacgtaattgcttatctccacgccattcttgagcaagttctacagcagcgcgttctaaattaccgctaaattgttgtaatttagtttcaaatttttcaaataatgtaaatgcatcggctacgcttcctgcaaatcctgctaacactttaccttcgtataagcgtcttacttttctagctgtttgcttcataattacttgttcaccaagtgtaacttgaccgtctccagccattgccgcttctccattgtgtcttacagcatatatcgttgtagcatgtaatgatgtcttactcatttatttactctccttttttgctcgaggatgtgcatttaaatacactttgcgcaattgttgattagatacatgtgtatacttaccagttgtagaaaggttaacgtgtcctaataaagattgaactgttcttaggtctgcaccttgattcaataaatgtgtagcaaatgtatgtcttaatttatgagggtggatttcagttacccccgctgtacgtttaactacatcattgagaagatatctaatacctctctcagtaataggatcacctttcatattaacaattaaataaggatgacttttacctttaagtggtttgaatttttctaaatattgttcaatactttgtctacaaaactctccaaaaggcacaaatcgttctttatttcccttacccaatacctttacccctggaagattcatatctaaatccataacctttatattcacaagttctgaaacacgaatgcctgttgcatataataattcaattactactctatctcttaatcctttttttgcatcgtttgaaacagtattaaataatgcttccatttcttcttcataaaaaaattgaggaagatattgctctttcttaggatgtacaagttgtataaaaggattatttacagatgtatcttgagtcatccagaactcataaaatgttcttaatgttgatatttttcttgatacagtagtacgtttcaaattattggaatataaataacttagataatttcttgcatctttatattcaaacgttcttaaatttaacagttcttgttctaaaaactgattaaattgagctaaatcgtcatgatacgcttttaatgtatggtcggagaaatttctttcaactttaagcatattcaaaaatttcttttggatttcttccactaaaaatcccctccatcatatgcattgtagcatataaactgagggggactaaaataattagctatagaattcaaaatcttttgagaatttgtgaataatttaaaaattccttcaaaatattttattataatttaaatctataacgtttttttgaaattttctaaatagtctagtgcacgatatgcttgtgcttcataacgttcttttttatctttaatgcggcgatcaagtgacggcaataaaccaaagttagcattcattggttggaagtttttttcatttttagcatgagaaatgtaataagccatactgcctatcattgtttctcttggaaaaatcacttctccttttccaagtaacttatgcgctaaattgatacctgctacaagtccacttgctgcactttcaacatatccttccacacctgtcatttgtcctgcaaattgaattctatcattattaattaattcatatttttcatttaaaacatcaggtgaattaatgaaggtatttctatgcatcacaccatatctaacaatatcaacattttctaaacctggaattaattgaatgacttctttttgagcgccccattttaaatgtgtttgaaagccgacaatattataaagcgtaccagccgcgtcatcttgacgtaattgcactactgcatatggacgtttaccagttttagggtcttctaatcctactggtttcattggaccaaatagtaatgttttacgacctctaccagccatcacttcaaatggcatacatccttcaaaatatttttctttttcaaattcatttacaggtgcaacttcagcttctaataccgcatcataaaaacgattgaattcttcttcagtcatagggcaatttaaatatgctgcttcacctttatcatagcgtgatttcaaatagactttatccatatcaattgaatctttttcaatgattggagctgctgcatcgtagaaatatagttgatctttacctgtaatttctacaatttctttagctaaatgttcagttgttaacgggcctgttgcaatgattgtatgtccttctggaatactgtgaatttctttattcaaaacagttacattaggatgatttttcaatgtatctgtaatataaccagcaaagtcatgtctatctactgctaatgcaccaccagctggaactctagctttatcagctgctgcgatgattaatgaatctaaacgtcgcatttcttctttaagcacacctacaccatttgttaatgcattaccacgtagtgaattagaacatactaactcagcaaatttatctgtatgatgggcaggcgtttgtttaacaggacgcatttcgattaaattcactttaataccacgttctgctaattgataagctgcttctgaaccagctaatcctgcgcctataacattaacagtttgactcatatacattctcctttaataaaactctatttttgtacttcttctttatagtcacaattagaacaaatcacttgagaactacgtccttttttatgttgcatcaagtaatgattacattttggacaatctcttcctattggtttatcccaagaaataaaatcacactctggataattcgaacaaccataaaataatctatttttcttagattttctctcaactacatcgccatctttgcattttggacaagtgacaccaatagttttaacaatagcttttgtatttcgacaatctgggaaattcgagcacgccataaatttaccataacgtcccatttttattaccataggagctccacatacttcacaatcttcgccggctggttcatctttaatttcaactttttccatttcttcctctgcacgtgcaacatctaatttaaaactaccatagaaattatcgataacttttctccaaccgatatcaccttcagcaattttatcgagcaaggtttccatattaactgtaaattcaacatcaataatttctgggaagtaatccttcacttgctcatacacgatttctcctagttcagttggtacaaaacgtttactttcaagtttaacataattacgtttttgaattgtgtcaatcgttggagcatatgttgaaggtctaccaatttttaattcttctaatgttttaactaatcgtgcctctgtgtatcgtggaggtggttgagtgaaatgttgtgccggttcaatttgtgttgcagttactttgtcaccttgatttaattttggtaatttattttctttatcattatctttgtcatcttttgcttcaacatataatgtcataaagcctttaaatttgattgtttgtccatttgctctaaatttaatgtcattttgtgttacatctaaagccacagtatctaaaactgcaggagccatttgacttgctacaaaacgttcccaaattaatttatacaagcgatgttgatcacgtgttaaatatgctttcatttcatctggtgtacgtaatgtacttgttggacgaatagcttcatgggcatcttgatccccttgtttgccttttgttttacggtttgaagtatactcagtaccatatttctcttcaatatatgattttgcttcatctttagcagtttgtgagattcgtgttgaatctgttctcatatatgtgattaatccaactgtaccttgtcgtttcaaatcgataccttcatataattgctgtgctaacatcatagtcttacgtgctttaaaattaagtttacgtgctgcttcttgttgtaacgtagacgttgtaaatggatttgcagggtatctcgttttttcttttttatttacattagtgatttcaaattcatcaccatttaattcggatgtaattttttcaacatctttttttgtttttaatttgtacggtttgtttttataatgtaagaatttagcagtgaactttgattttttatatctaaattcaccttcaattgaccaatattcttctggtttaaaattacggatttcattttcacgatcaatgactaatcttaaagcaactgattgtactcgaccagctgacaatcctttttttactttcttccatagtactggagaaatattataacctacaagtctatctaaaatacgacgcgcttgttgtgcatcaactaaattcatttcaataccacgaggatgtttaaaactttcttttactgcatccttagtgatttcattaaatacaactctgttttcttttgattcttcaagttctaaaatttttgataaatgccaagcaatcgcttcaccttcgcggtcagggtcactagctaagaaaacttttttagcttttttcgcatatttttttaaatctttaacaacaggacctttacctcgaatagttatatattttggttcatagttatcttctacgtctacacccatttgacttcttggtaaatctcgtacgtgtcccatagaagcaataactttatatcgtttacctaaatatttttcaatggttttcgcttttgcaggcgactcaacgatgactaaattatctgccaaagtgaattcccccttgctttttcaattactaaagataaatgataaacggttaattttgtttttgtcaatattttaatccaatatagatatttttttgtgaaatatcctttgaattttcacaattaattatttatatatttaatcgtttaaaaagcgataatcatataatatatcttctgcttctgaaacaatcattgcaccttcttgagcacgtaataaatttccttttgtcaaaggattaaacatcgatccaggcagtacataaacatttctattttgatctaaagcacaatctattgtaatttgactaccacttttaattttagcttcagtaattaatacaccacgagacaacccgcttatcagacgatttctttcagggaattgatatttgtttatttttgttaaaggaggatattcacttatgactaaaccagtttcttcaattatattgcgtaactttcgtgtttcctttggataatgatttaaatgaccaaaacctagaactgcaatagttggaagatgatgttttaatgcgaattgatgagctatgctatcagcacctttcgctaaaccggatacaatcgttagtggaatatttataaagtgaggaaatagataatctagtgcacacttagaataatttgtggcctcacgtgaacctacaacacctaaagtatacgtagatgataataaatgtatatttccacgataaaataatataaaaggatagtcgtaaatagttttaagcaatgaaggatattgagaagaaaatgaagtaacatagttaacctgatatctagaaagttgggtttgaatataatcgtaagaaatctctgttaattgagtaaaacgcttcttttttaaatatagagattcccattcattgatcatttcaaattgatcatgttcattaacattgaaaaattttggaaatacattgagtaaatgatgaatatgttgggtcgtataccctatccatctcatttttaataaaataaaatcattcatgaagtaaatgtctccttttaatttattataccgtgaatcattaacagtaaaatttcatttataagacaaatttgatatataaatgtaaggagtaataatattaaaagattatgtatactttttgatttcataacatgtgaaaaatagagcgttcagtcatttataatatattgtagtctacgatatatataagaaaaactgccaacaaatttcagtaattgttgacagtttgaattcaattattaattacataattgctacttcactgttaatagttcttcataaatgcctgcttcttttgccgcttcaattagtgttgtaccaatttctgatggtgtatctgctgttttaacaccacattcattaagcgttttaattttttctgcagcagttcctttaccacctgagatgattgcacctgcatggcccatacgttttcctggaggtgctgtttgtccaccaacaaaaccaaccactggtttagtcatgtttgctttgacccattcagctgcttcttcttcagcagtaccaccgatttcgccaatcataacaacagcttttgtttcttcatcttcattaaatgctttaagtacatcgataaagtttgtaccgttaactgggtccccaccgatacctactgctgtggtttgaccaataccttcttcagttagttgatgtactgcttcatatgttaaagtacctgaacgagaaacaacacctacatgtccttttttatgaatataacctggcatgataccaattttacattcatctgctgtaattacaccaggacagttcggtccaactaaacgtgtttttctaccctctaaataacgcttcactttaatcatatcaacaactggaatatgttcagtaatacagatcaccatatctaattctgcatcagctgcttctaaaattgaatctgcagcaaatggtgctggtacgtaaactactgatacgttagcacctgtttcttttttagcttccgctactgtattatacactggcacgccttcaacaacttgtccacctttacctggtgttacccctgcgacaatttgtgtgccataatcaagcatttgttttgtatggaaaagggcagtagaccctgtaataccttgcaccattaccttagtattcttatctataaatacacccattttagtgttcccatcctttccttacgcttctttaacaagtttaacaatttgttgtgcaccttcagccattgttgctgctggttcaattgctagaccggattcatttaaaatctctttaccacgtttaacgtttgtgccttctaaacgaacaactaaaggtaaagttaattcgacttctttaactgctgctacaataccttctgcaatcacatcacatttcataattccaccgaagatatttacaaaaatacctttaacattatcatcacccaagatgattttgaatgcttcagttactttttcttttgtagcaccgccaccaacgtctaggaagttagctggattaccaccgaaatgattaattgtatccattgtagccatggctaatccggcaccattaaccatacaaccaatgtcaccatctaaggcaatatatgataaatcatatttagatgcttgaatttcttttggatcttcttcttctaaatcgcgtaattctaaaatatctttatgtctgaataatgcattatcatcaaaatttaatttcgcatctaaagctaaaacatcaccatcacccgttgttacaagtggattaatttcaacaatagaacaatctttttcaacaaaaacattatataaagaaagtaagaattttgctgctttatttacagattcttttggaatattaatattgaatgcaatacgacgtgcttggaaaggtgataaccctatcactggatcgattgtttctttaaagattttttctggcgttttagctgcaacttcttcaatttcagttccaccttcttcagaagccatcaatgtaatacgatcagtagcacgatcaatgacaaagcctacataatattctttttgaatatcacaaccttcttcgatatataagcgtttaacttctttaccttcaggtccagtttgatgcgttactaattgcttgcctaataattcattagcataagtttcaacttcagacagtgatttagcaattttaactccacctgctttacctctacccccagcgtgaatttgtgctttcactacataaacatctgaatttaattcttttgccttttccaccgcttcttcagcagtaaatgctacacgtccttctggaacggctacacccatagcacgaaatatttctttaccttgatactcgtggatattcatcttccatcctcctgtttcttaggttaaattcactttaattatagaaaatgtaagcgcttttgtaaactgaaagtgttatactttttgcaatagtttttaaattcaaataattttatttttatttaattatatcattgatttaacaggctcaaacgttttacgatgatatggcgttatgcctaattgttttaatccttgaaggtgtgatttagtgccatatcctacatttttttcaaaatcataaccaggatatttcagtgctacttccgccattaaaccatccctatattcttttgccatgatactagcagcagcaatagaaacacttttagcatctcctttaataatagaagtttgaggaattgcattatccaatgtcatagcatcaataagtaaatggttaggttgttctgttaattgattaatagcacgtttcatagctaatttggttgcgttgtaaatattgaactcatcaatttcttcagcgcttgctatcccgtaagcataatcataaacgccttcttttaattgttcgttaagtatttttcgctttgttgctgaaactttcttcgagtcatctaatcctaaatattgatgttctttatttaaaatgactgcacaagctacaacaggcccagcaagtggaccacgacctacttcatcaatcccacatattaaagcattaggattgtcctttaatatttcattttcatatttattcatttgttgataatgttctcgtgtttcttgatcttttaaaagctgtttacgacgtcgtactatattttgctgtaccccttttcttgtatcactcattaattcatgttgttcaagtgcttcaattgaatcaattgtgtctaataatgctttaatctctttaattgtttgaggcataatctaagtcccctttcatttctgaataaatatcaaaacaataagttccaattttagcattacgcacatcattaataatcaattcgatgacagcctcgtaatcgacttcatttcctttttgtaataacccacgtcgacgtccaatagcatcaaaccattctaaaatttctgcatcagtttctacatcaatattgtaatgattcttcaatccttcaatatcatgtttaattaagaagtgtaaaccgtatattgctacttcatctaagtgtacgatactatctttaatggcaccagtaaggcttagttttttacctacagtttcatcttcaaatttaggccataaaatacctggcgtatctagtagttgtaatgctttacctactttaatccattgttgttgtttcgttactcccggcttatttcctgtttgagcaatattttttttagctaacttattaattaatgtagatttccccacattaggtataccaacaatcatggcacgtattgctctaggtttaagtcctttcgctttttctttctcaaatttttctttagtcgcttcaattgcagcatattctacaccttttaaatttttgccgtgtttcgcatcaactgctacaggataaaaacctttatcagtaaagaaatgttcccacttttgcatttcatttaaattcgacatatcttttttatttaaaataactacgcgtggtttttgtttaatgacatcatcaatcattggatttcttgaactatacggtatacgtgcgtcaacaagttcaaataccacatctactttcttaagttgttctgtcacttctcttttggcctttgccatatgccctggataccattgaatcaccatgacattcaccctactttcattaaatttatttcaactgttcgattataatcaatatttaaaatcttcactactattatcaattctattatattttaacatgctatttcatattcattaaatcgctaatattaaaaacaaatttctaattttttataaaacatataaatacttttattaagaagtttaatactctacaatttagtatgtagtcattttttaattatgaatagtacattctaactatagaggtttaatatgaaaaaattctttacttatctaggactttttatagcactgtccatcataggacatagttatgtcatttatcgttttattcacgatggtattttatttacaggtccaaatgatggaatggaacaaatggttccaattcaaatgtatttatttgataaatggagtagtggcaatttgttttattccactgattttggattaggtggcgatttctttacagatcttagttactacttctccacaaatattttatttataataaatgtagtatttattgcacttattaaaatttttattcctttacatacgcataatgtattattttggatgattaatgcactgattatgtccatgattaaagcaatgattgccatgtattgcacttatttatatagtaaatacatttcaaataacaaatggttaagcttagttgtagcgtttttatttgttatgtcacccttatattatcgctttacagtgtattggcccttctttagtgatgtgtttgtttggatgccgttattattactctctattgaaagagtcttacaaaaacagaagtttggactattcattgttactgtttctttaatactaattaataacttttattttgcatactatctttgtttaataggtgcgggttatatactgattcgtataatatttagacatccaaaagatattctctcaagaagtaaagcatttttaactttaatcattagtgccctgttaggtttaggtaatagtttatttatcttttttcatggtgctcaaagctttttaaataaccgtcgtgtacctttttctggagcagttgatacatttgaaaaattagatattaatacaaatattttctttgataattatttaattgtattattatttattaccattcaagctcttttaagttttaaattatataaacattattattatcgtttatttgctatccttacctttgtatttattatatttagttttatacctttcatcgaccaagtatttaatggtttttcagcgcctcaaaagcgttggcattttattttagcttttaattccacactattaatcggattatttttaaaatatttcaaaacactaactacaaaatcttatctaataagtaatattattgcagaattagttatatttataagtgctatgatatatcataaatttttagcatggttcatattagtccctattgtatctttgattggattgatggttcttatcattaaagatcgtacatatcgttttaaattaagttatttatatagtgtttcaattatattattaagtatcttggtctctatagtatttattaaaaatcaaatttactataaagatcacactgatcgtggaaatacgttttatattaattccagtttatatagttccgacttacaacgtgcacttgttcaagaaatgaatcaaaataagcatgaagatgaacgtatcgattggagagtcaacgagcaagataatacaccgatgtatcaacattttaaagggttaagtttatattcaagtatttttcatcataatatactcgattattattacgatgctttaaaaattaatttagctgaggagtcattgagtagatatcaatcaacgaatggacgacaaaatatcgcgagtctattttcagtgcgttatatgatgctaaaaaattatcaaaataacttaccttcctacttcaaaaaaataaaatcaagcggacaatatggtatttatgaaaatacacttaacttaccatctgttaaagtaactgattctatatacaatagtaaaaaattgacgactgcaattgatagagaacatgcaatgttaaaaggtgtgattttaaacaatgaaggcacaagttataaagctaaagctcctaatttattaaatcaatcatcattgagttataaaaatttaaaacatttaaatggtaatgtctataaagtaattggagataaaggtggaacattaacgatacacttacctcaatcattacgccaaaagtatgatgatttttacgttacgatgaaaataaagcgtggtaatcctgatagtaattacacagtctctgtaaataattatgcaaatcaccgattatttaacaattctacttatcgtactggtattgatactcaactttatcgaacacaacctgataataagggaaacattaatatcactttatctcctaaaggaacattttatttaaaacttcaacaattaaatggtgaaaactataaaatattaaaacaaatgcataaaaaagctgattttaataacaaatataaagatattaaaaacggcgttgaagtcaacttagctaaacatgataaagggattgcttcaattaatattccttatagagaagggatgcaagcgtatgttgatggacaccgtattaaacctatgaaagttaattacatgatgacaggcgttcctgttaattcatctgctaaaaaaataattattaaatatcaaccaccttattggaatactatgattttaatctcactcatcagtatagtaataagtgttgtatttgttagatttgttaataccaaaaagagaaagttgaggaaaaacattgatcaataaaattcggtccaatcgattattgacctttttatctatatttataattgctaatatcatttctttagcaatttattatccatttattcgagattatttcaaagaaggatttgtatttagtggttctggagatggttttagacaaatgatgccatttcaaatgtacttatatgaacattacagtaagttcaaaggagcctatgatcaatcttttggattaggcggagattacattaaggggttggcctattattattctttatctcccataatgtggattaatttttttataatctgggtaagtcattttttatttcattggcaaacgagtcatatcgccttttgggcaactaaccaattaataatcgcttacgctagaacgattattacaattattgttgtattttactatttaaaatggctaaagttgaaaacagcgccattgcttatcgctactattttatatggtgcatccactcttgtgctttactataactatacatggtcattttatggagacttattgattttattacctttatctttatggggaatggaacgtttcttccaaaaaagaagaatagggctatttatcttttcagttgctctgaccttattttctaatttttatttcagttactaccaagctattgtattagggatttatttcatattaagagtcatttttaaatatcgttgtgatatcgtatcaagatgggaaaaattttatttactcgttattggtgcaatacttgcgcttttatctagtattttaggattctatacaggtgtatcttcattcctaaacaatgatagagcccaaaatgatgactttaatattacattgtttacagatttaacacaaagtaaatatcatattttttctgatggtttttatatcacagtttcgattattgcattaatggctttatttacgtttaagttatatcgtcactactattataaaatttttgctatcatcacttggtttttacttattggatcgttatcacaatactttgatagtgcatttaatggcttttcattaccacaacgtcgatgggtatactttttatctatttcaactagtatcttaattgcattatatattcaatatttatctgaacttacattaaaacaatatttacttgtagcaattccggtatttatatttggtttatatcactatatatttgcaagtgcttatgtcaattggatgattgtaccattatttttaatcatcgttttaatctttgtagtatggaaaaaacaatggttatatcaaccttatatactaatagctattgtattactattctttgtacaacaaattataatgacacacgattcacgagcccgtactattgatccatatgcaacgactacgaaaacattaacagattcaagttattataatcataaacttgctaaaaaaattaataatattaaaaaacaaaaagataataaaaatcctttccatcgtatcgattacatgtcagcctatgcactcaattcaccatttatttaccattataatggcatttcactttactcaagtatttttgatggtgacatattaaaatactatgataaagaaatgcaaattaatatgcctgttgataaaaatagtacatatcgatacttagggaatcgagcaaatttagaagccatgtgggatgttcaagatcgattccgacatcctaatgatctgaatatgccttatggttttaaaaaggtagatactatcaataatggttcagataaattaattcattcagaaaatactattaattatccagccacgcatattactaataagatttttaataaacatgatctcaaatcgccattagatcgtgagcaagcgatgctacaaggtgtagtattagatgatgattcaataaaagcgaatacttctttcactcaaaataaaaacctattaagtaaagcatatcaatctacaaataatgctacttggaaagataaaactcatttaaacgtagaaaaaaataatggtggtatcacattgacattacctaaaacgttagctaatcaatataaagatatgtatgtcgaaatggatgtagaattgttagctcccgatattgagcattctataggattaaatgaatatgctcaaaatcgtaatatgctaagttataaatatcgacgttttgtaacgcctgtaacaatgagagtaaaagcttcggatcaattaaagattcgtcttactaaaggacattatcgattatctattaaaggtatctatggagaagattatcatacattgaaacaagcttctaaatcacttaaacctgtgactatttcacaatttagaagtggctatacattcactaaacctaaaggaacttctggatacttagtggtaccaatcgcctatgctaatggtatgcatgcacgtgttaatggacacgatgtagatgtaaaacaagctaacggtattatgacagctattccagtcaagaaaaatgatactcatattgaattatcttatacaccaccacatttttatatactattaattttgagcgttatcggaataataagcagtataatatttagcagatatttaaaacgaaaaaatcaattaaaataaaaagagcctgagtcataattactagaaaaatagccagtaaatgtgtttattataaattcatttactggcttctttatttacaatactgcgtattgttggctcgcttttttagggaatagcttcagcctgcagtcttcagcttgttctgttctctcaagagtcttgccaaaatattttgtatttatatgtaattttacattgaaatacttaagaaaataaggcatattcgtacaatttaataaacatcactaaactaaatcaacgagatgtcttatgtataaagattataatatgattcatcttactctaccaatggtaatttcagttctcattcccatacatgatatttcacgacatgtaaatgatattgtagaaacaaatactaagactgaatttatttgtccgaacaataaaagactagtatttaaaaaatatacctatcaccatgataaatatggctttaaacgagattttaaattatatgaatgtgatgatgattcagaatgtcctctgaaacacccatgtatgaacttcaattcaaaaacaaataaaaaagtaatgaagaattataattgggaatattttaaagcgcaaattaataaaaagctttcaaaaacaaaaaccatctatagtcaaagaaaaattgatgtggcgtctgtttttagatttataaaggctattttgagttccactcgaatgtccgttcgagggataaataaagacaaaagagaactaggatttgagctaatgacacttaatttaagaaaagtaacagctcaatgagcagaaaataatcacaaaaattataaaaaagacaatttctatattatttcaatagaaattgtctttttttacttatcttgaaactttatatccaagactcttttttaaatgcgtattaacttacccattttttagtatagttttctatatactgattagcgaatttcttgaattcttgcagctttaccacgtaaactacgtaagtagtataatttagcacgacgtactttaccgcgacgtttaacttcgattttttcgatttttggagtgtgtaatgggaatgtacgttccacacctacacctgaagaaattttacgaactgtgaaagtttcagaaattcctccaccgcggcgtttaattacaacaccttcgaaaacttggatacgttcacgtgaaccttcgacgatacgtacgtgtacacgtaaagtgtcaccagtacggaaagttggtaagtctgtgcgtaattgtgattttgtaactgcttcgattaacttatgattactcatttttatactctccttcaacctatgttcttgcctagacattcatatagcagcggatcatagtgatttttagtgtcttttcacacttgatatatattagcatactcctaattgtttttcaattggtttttatagctttctaaaaattctttatccttatcacttaattgatacttttctagtaagtccggacgtttatgcaaagtacgtattaatttttgttcatgtcgccatttttctatatttgcatgatttccagataacaatacgtcaggtacagtcatacctttatattctcttggacgtgtatattgtgggaattcaagtaaaccatcggagaaagaatcatcttgatgggattgttcattaccaagtactccaggaattaatctaacgatagcatcagtcatagtcatagctggtaattctccgccagtcaatacataatcccccattgaaatttcatcggttactaaattttctctaattctttcgtcatatccttcgtagtgtccacaaataaatacaatatgttcagcttcactcaattcttcagcaattgcttgagagaatggtcgtccttgaggacacatgagaatgacacgcgttttatcagtacgttttaaatctttcattgcattaaacactggttctggttttaaaaccattccttgaccgccaccatacggataatcatccacttgattatgtttattttcagcgtaatctctaaagtttacagtattaacttcaataatatttttatcttgcgcacgcttcaaaatcgaatgatttagaacgccgtcgaacatttctggaaataatgttaggtaatctattttcattattctaataatccttccattggcgtaatacgaattgttttatgttcaacatctacttctttaacgacatctgctatatatggaataaggtattctttgtcacctttaacaacccatacatcattggcacctgtttcaaaaatattaatgactcttccaattggtgtatcattattaaaaaccgtacacccaataatatcagaatagtaaaattcattttcattcaattcaatatcctcatgatcacgttcttggaataagtagtcgcctttatattgttcgacgtcattaatattattaataccttcaaatttaagcatgtgaaatcctttatgtatacgatatgatgtaatagtcatttctatttcattatggtggtgattcacgataaggacttctccaggttgaaaacgtgtatcagtaaaatcagaattagattttacttttacttctcctttaatcccatgtgtatttacaatttgtcctacttctacttgcatccttatcctccttacatagtcgtttatttatacatattaacatgtttcttataaagtgagaatataataaaagcctgtgacataccttatgccacagacctgttattatatgatattgatattattatcaattattttgaacgtttttgttcatcaaatgtttttaaaataccttgttttgataagatattgtgaacagtatcagttggttttgcaccgtcttttaaccattttaaagctaattcttcatcgattttaacttctggtgcatttacacttgctggattgtaagtaccgatttgttcgatgatacgaccatcacgtggtgaacgcgcatcagctacaacgatacgatagaatggatttctttttgaacctaaacgagttaagcgaattttaactgccatttataaaactctcctttaaatcttttaatttttattttctacaagaaataataataacaggaacctccaactttgtaaagacttttttctttaccaaatctagatttatgaaataaattgtagatttgattatgtactagctttaactagagcttacctttattcattttagttatgtatgtgccaatgtacatgcgttcctttacttatttatgaaaaagcggaataacacttaggatgttattccgctttcattactttttagaatggtaaattcatgccttttaacatattttccatttggctacgtttaccttttttacctttacgaccattacccgtaaattgtttcatcatttttttcatatcattaaattgtttcattaaacgattcacttcctgcaatgaacggcctgagccttttgctatacgtttctttcttgaaacatttaaaattgctggatcttgtctttcattaggtgtcattgattgaataatagctttaatatggtcaatttgtttatcgctcatatttagcttatctaaacctttcattttattcatacctggaatcattttcataatatcatccagtggtcctaaattcttcacttgatccaattgttctaagaagtcatctaatgtaaatgaggactcacgcattttcttttctaaatctttagctttttcttggtccacatcttgttgcgctttttcgataagacttaatacgtcacccatacctagtatacgagatgccatacgctctggatggaataattctaaaccatccattttttcactcataccaacaaatttaattggtttatgtgttactgcacgaatagaaagtgccgcaccaccacgagtatctccgtctaatttagttaaagtcacaccagtgacatccaattgctcatcaaatgattgcgcaacgttcacagcatcttgtcctgtcatcgcatctacaacaagcataatttcatctggttttgagatttctttaacatcaattaattcattcattaatgtttcatcaatgtgtaaacgtcccgcagtatcgataattacaaagtccaaatgttcttctttagcatatcttaatgcgttatctacaatttgttgtggtttaacttgatcaccttcactataaacaggtacatcaagttgtttacctactgtttgtaattgattaatcgcagctggacgatatatgtcggctgctactaacattggctttttattatattttttacgcattaacaatgccaatttaccagcggtagttgttttacctgccccttgtaaaccaaccatcattacaactgtgggtggcttattagccattttaatagatgtattttctccacccattaattgtgttaattcatcttgtactatttttataacttgttgtccaggtgttaaagactgcataacgtctgatcccaaagcacgttcggaaactgttttaacgaagtctttgactaccttgaagttaacatcggcttctaacaatgctaatctaacttcacgcatcattgttttaatatccgcttctgttactttacctttaccgcgaattttttgcatcgtggcttgtaaacgatcggataatccttcaaatgccatattaacaacctccttataaattattctagttcttctaatttttggattaaatgttccagttttttagtatcatgaatagattgtttcatttcgttataaatcatttgacgttgttcaaatttctcatataactttaatttagtttcatagtcttctactaaatcgccagttcttcttatattatcataaaccgcttgtctactcactttaaacgtttcagcaatttcacttaatgagtaatcatttagataaaataactcaagataattcttttgtttttcagtaagcaaagaatggtaaaaatcaaatagataattcattcttaacgttttaactaaatcatttttccccattttggtgttcctcattattatctgttaagctttgcatttcatcagggatattatcattttgctcaatcatatcagcaaacaatccatatacataactttcaggattaaatggttgtaaatcatctagtttttcacctaaaccaacgtattttactggaatatgcaattcgtttcgaatcgcaagtacaataccaccttttgctgtgccatctaatttagtgagcacaatccctgaaacgttggttacttctttgaatgaacgtgcttgtgatagtgcattttgaccagtggttgcgtctaaacataataatgcttcatggggtgcatctggaacagcacgactaatgactcgtttcattttgtccaattcttgcattaagtttgatttattttgtaaacgacctgctgtatcgcaaattaaaatatctacacctttattcttagccgcattgattgcatcataaacaactgctgcaggatcagaaccttcgctttgtctgattacctctacgcctacacgatcgccccaaacttgtaattgttcaattgcacctgctctgaaagtatcaccagcagccaacataacttttttaccttccattttataacgatgtgccaatttaccaatcgttgtagttttacctacaccattgaccccaaccattaaaatgacatttaatcggccatcttcgatgttcattgcttctgaatgatcatcttcttggtgataaatttctacaattttttcaacgataacttctcttaaaccttcagtttctttgatattacgacgttgtgcttctgtacgtaattcatccgttaattgcataaccgtattgaaacctacatccgcagtaatcaacatttcttctaaagcttcgaagaaatcttcatctacagttctataacgtgcaatcaagttatttaattgctcttggaagttttctcttgatttttctaaacctgctttaaacttcgctcccattttttgagcttcaatttcttcaaaatcttcaattgaaattaacccatcttcgtcaaagtcagcttcgcttaatttacgtggttttttcttttttggtgcaggttcttcattttcttgttcattgtcttttgttgatggttgatctaattcctcatcttccgttaattccttttcaatatcttcagtcgactttgtagaaaatttatcttttagtcgtttgaaaaaactcatgcattttcctccttcataacctcatctattgtatttaaatttacacttactaattttgaaacgcctgactcttgcattgtaacaccatataaacgatccgaatactccatggtaccttttctatgcgtaatgacaataaactgtgttttttccgataaatcatttaaaaattgtgcgtaacgaataacattagcttcatccaaagctgcttccacttcgtctagtataacaaatggtgctgatcttacttttaaaatagcaaacagtaatgcaatagcacttaatgcgcgttcgccaccacttaataaagaaagattttgtaattttttacctggtggttgaacaataatatctactcctgcagacaagtaatcatcatccgtaagctctaacttggcatgaccaccaccaaaaagtgattgaaagacagttgtgaaataatcttgtacttcaaaaaatgtagctttgaaacgatcttttacttcttgatccatttcatcaatgatttgttctaaagtctgttttgcttctcttaaatcatttctctgttcattcaaaaatgtataacgttcatttaattcttcaaattgttcaatagcattaacattaactgaacctaattcttcaattgacatcttagttaattttactttttttcttaatgtttctattggaacatctgattgataagtttctctcgcacgttcaagtgtaagatgatacgtttcatttaaatgattcattgcgtgattaataagaacatctaatttagactgttgggccttaatatcttgataaaaactttcaatagataataaatcttgatggcattgttcgagtttgtactcatgaatttcaatatcttcatttatagaatctttctgttcttttaaagtatcaagtttttgttttaatttatcacgttgagacgctttatcttggatacttgattgaagttgttgaaatgctttttcgcccatcatatcgtcagaattaaataattctattttctctttagttgcaatgatttgttggttaatttgtgcaagttgcttatctattctttccaatgacataatttgatgacttattttttctttaacgactgcaacatcagaacgtttttgatttaattctttttcaacttgcgatacattttctttaccttctttagagagttttgaatatacctctatgtcattttcaagttgttttagttgctcttgaatttcagataaacgcaattgttgttgctttaatgtgtgacgacttttttcactttgatagccatcatttttctcaaattcaaattcttcatgttcactttttatatgtgtttcttgttttttcaatcgatctaaagtcaatgtttcttcgtgagcggtatcttttaattgatgatattgttggcttaactctacatacttattacttaatgtctcaactttctctttttgcttttgcaattgttgttcgaattcttttgttttctcttcgtagtcgtttaattgtattttcattgttgccaattcatctttttgagctaaaatactttttgattgacgcattccgccacctgtcattgctcctcctggattaacgatatctccttctaaggtaacgattcgtgctttatattgaatcgctcttgcaagttcattcgcaattttaagattctccactataattgtagtacccatcaaattatctatcacagcttgatacgtttgactaacttcaaccgcttccgatgcaatattaataaaaccatcaaaatttcgagctatattttgaatatgatgagataaacttcttgctctaattacatttagtggtaaaaatgttgctcttcctaatcctcgttgttttaaaaattttatcgcttggcgaccatctttttcattatttacaataatgtgttgtaatgaggctcctaacgctgtttcaatcgcttgtgtcaattttgatggtaccttgatgacttcagctactgcaccatgaataccacttaaagtattctcttttgcttttaatatatgttttactccattaaaaaagtaggaatagtcttctgcttgtgtttctaaactttccatacgcacgcgcattttatcagtatatcgatatgcttgatataacttatcttcatatgtcgcttctatacgttttgcttcagataaacgatcttcaacatcacgcatgtctttctctgttatgttcattttttgtgatgtagtagtatgcgcttgttctgtttgatgtatgtcattttgaatatgtttaagttgatcaaatacttctattaatcttgcatcgagacgtgtttttttggtttcattttcttgaatagtacgttctaaaaaacgaatatcattattcacttcagattgctcggacattaattcataatattcatttttaatagtttctaatttttcatcatgttgtgcatctgtaagattaagttttgattctaactgtttaatctctttattaagcgattgatgctgttttttaagtttagatacttgttctacagaaagttctctttcatcttgaacattctttaattcatactgtaaattatctaattcttcttcaaatcgtgcattcgtttctgattgatttctttttcgctcttcaagtacatttaattttccaataaatttttcatattcctcagttgtagtaattaaatctatattagtgtggtcggtatctctttcaagtttttgacgttgcgttttttgtttttgtaaatattgatttaattgagcttgttgaccttctttttcagcttgttggctttttagatgattcaatcgttcatcgagttgacgattatcttcatcatattgattaatatcgtgtacagttacgacaacatcactatgctccatctcttttgataattgtaagtattctttagcaatagatgcttctgcttttagaggttcaacacgcccttctaaatcatataaaatatcctctactcgagatagattatcttctgtatgacctagcttttgtaaagattccgtttttctttttttatactttaaaacacccgctgattcttctatgatttgacgtcggtcaacaggtttagcatttaaaatttcatctactctaccttgtgaaataatactaaacgcttcttttcctagaccagaatctaaaaataactctgtaatatcgcgtagacgtgccctatcattatttaaataatattcgctttctccactacgataaagacgacgtgttacaatcacatcatcagcctcaatctgcaactctcttgtagaattatctaattttaattgtacttctgcataattttgtgcttgacgatgttctgcccctgagaaaataatatcttccattttagagccacgaagcgacttagcagattgttctcctaaaacccatttaatcgcatcagtaatattacttttcccactaccatttggaccaacaattgctgtcacgcctttatcgaactgtacattcgtacgatctgcaaatgacttaaagccaacggtatctatagatttcaaataaaccatactcttctccttaattcattcatactcattcttgttgaaaagaagataatatatgaaatgcgttcattattatttgttctcatctcttaacttatgataagcactttcagctgctttttgttcagattctttttttgttctgccttgtccttttgcgattgctttattttctaaaatcacttcagatgtaaataaacgatggtgtgctggaccttcttctttaatcaaatgatacgtcacatcccctttactttgactatgaatatattcttggaattgtgttttaaaatcgaccacgccaattaattcattatgttctacatatggaaaaatgactttttgagcaaacttccagactacttctaagccttggtctaagtataaagccccaataaacgcttcaaaagcatctgatactaatgaaggtcttgttctaccacctgttttttcttcaccttttccaagtaaaatgagttgatttaattcaattttatttgcaaatattacaagtgagggttcacatacgattgtcgctctcattttagttaaatttccttctggtaaattaggatatttgtcaaaaaggtaacgtgaaaccgtcaattctaataccgcatctcctaaaaattctaaacgctcgttatgagctaatcgatccatattaaaatcattaataaagctagagtgcgaaaacgcttgttggtacacatctaaatgagtataactaagaccaagcattttcatttttttatcaaattgatattgaaagtctttaatcatttctgattgtttcgggtgcatgattgataaacctccgttcatgttattgatgtcctatgaaaaaaatctgagccatcatgacgacgactcagatgtaagtttttatttttcaagactattgatgtatttaactgcatcaccaacagtgttgattttttcagcttcttcatcaggaatttcagtaccaaattcgtcttctaattccatcactaattcagcgatatcaagtgagtcagcgcctaaatcatctttgaaagatgcatcttctgttactttatcagcgtctacacctaaacggtcaacgatgatatcttttactttatcgaagttttccacgtcgattcacctcctttaaaagtgtctatccatagactattatattttcccattttaagggctaaaacacaagtatttattaaaaggataatgactatttatccttttaaatacatgacgtatatattacatatacatgccaccattaactgataacgtttgacctgtaatatattttgcacgatcagatgctaaaaatgacactgcataggcaatatctttatcttctccaaaacgtgataatggaatttgctccaacatttgtgatttaagatcttcatttaatgcatttgtcatatctgagacgataaacccaggcgcaactgcattaacagtaataccacgtgaagcaagttcacgtgcacttgattttgtcagtccttcaatacctgcttttgtcgcaacataattagcttgtccaggattacccatagccgctacaatactagataaattaataatagcaccgctacgttgacgtaacatttgtggcgtagctttttgaatacaattaaatgtcccttttaagttagtattaataacgtcatcccattcttgctctttcattcgcattaataaattgtcttttgtaatacctgcgttgtttacaagaacatctaaagagccaaattgatttacaacttctttaatcataactttgacttgatcaccttcagcaacatttgcttgtattgcaaaactttctacgcctttttctttaatttctttaaccactgcttctgctttttctttattacccgcgtaattaactgctacattgaatccatcttctgctaattgcaatgcaatactacgtccaattcctctagaagcaccagttactaatgcacttttagtcattttcattccatcctttcacatcttctaatgtttgaatcgatgtaattttaacatctcgattaatttttttaattaaaccagataatactttaccaggtccaatttcaataaaatgatccacaccttgatctattaaccattctgtcgatttaataaattgtactggtgaatagagttgtttcaccatattttgtttaatcgtttctgcttttgtttctccatgagcattgtaattttgaacgataggaaattgagcatcattccaagtgaattgatcaataaatgaagcgaaattctcttcaattacttgcatcattgaagagtggaaaggacctgatactgctaaaggaatcacacgcttcgcacctaaagattttccttctttagttaatttatcaatcagcgctttatgcccagatacaacgatttgacctggtgcattaatattggcaggttcaattaattgatctccaaatgaaatttctttacaaatttcatttacctcttcataacttagccctaaaacagcagccatacttcctacaccatttggaaaagcttgagtcattaattcgccacgcttacgcacaattttcactgcatcttcaaattttagtacaccagcagccactaaacttgaatattcacctagactatgccccattgtatagtcagcatctatatggtttagtgcttttagtaatgcaatactatgtgttaacaatgcaggttgagtattctcagtttctcctaatttttcctctttatctgtaaacatcgtttctaataaatcaaaatcaaccgttgtttgcgctaattctaaaatagaagtcgcatctttattaacttgatataaatctttagccattccgactttttgtgcaccttgtccaggaaaaacaattgcagttttactcattgtcactacctaccgtttctctcataatttttactatttgttcatcaccagcaattttagcttgtcgaattgcagaatagaatgcacgtgcatttgaactgccatgtgcttttactacagtaccatctaaccctaaaagaacagatccaccatattctgcataatctaattttttcgcaaacttactgatatcttttttcaatatcgccgcagcaagcttattttttaaattagctaatagtgtaccttttaacatttttccaattgatttagcagtaccttcgatgttttttagtaccatatttccagtataaccatcagtgacaactacatctgtgtcaccctccatcaatgttttagcctcaatatttccattaaatcgaatagtcgcttcatcttttaataattgatatgtttttttagtcaaagcatttccttttgctggttcagttccgatattcaacaatgatattttaggttgttgaatacctctaattttttgagcataaatattacctagctgtgcatattgcaataagtgttcaggttttgcatctgcattggctccaacatctaaaaagacaaatcctttaccatcgatagtaggtaatgtgacaacaagtgctggtctagctacgcctttaatacgtccgacgataaatagccctgctgacattaaagcacctgtattaccagcagatacacagccatctgcctcaccagatttaaccgcttctgccatgcgtaccattgaactgtctttttttcttttaatggcacgtacaggctcatcttccatctcaattttttctgaacaatgtctaaactctatacgctcatgatttaatgtatattgtttttcatcaccaaataaaataatttctaaatctttaaaatcattgattgctttttctacagcttctaatacgattcctggtgcattgtcgccacccatcatatctacagcaattttaaccatggttttcatcctcacttatataaaacattttaaatatgcctgtaaaaacgcgtgtatcttttacaaaagattccacttttatatcataatgtcgatttgttctattgattacggttgcttctgctctaacattatcatgcaactttactttttcaataaatttcaaattactttcttgagttaacacagtagagttatgtattagggctacacataatgaattagcttgagcaaataaaatatgcccccgtgcaatacgtgttttttgaaacacatactcttctgtaatttctataatagattgggcagaataattaggtttaacttgaataagatccccaatcacttcattagcttccaatcctttgatatattcataattttgtttagctacagatttaatacgtttacgtaattcaggaatattaagttgtgtgcgatccagacggatagtttgaatacttacgttgaataattcacacaattcactatccgtaataaaggggttttcattaatcgccttcttaatctcatgacgacgttctgttttttttaatttcatactttcctcccctttaaatattttagtaccaagtcttaatcattcctcacatatcataacactttctatttattatcctcaacaaatattacatgttcatataataaataatttgaattaaatatcagtttactgatgttaatcaaaacttatgttaagtaaatggtcgttgataaatgctcttaaacgttcatatttctcagtaaagaactccccggattgaatgagttctgcagcctcatcacgagctacttctagcatacgataatcttctactatattagcaaccataaaatctggtaacccgctttgtttaactccaaagaaatcaccagggcctctcatttctaagtcacgttcacttaattcaaatccatctgtagtttgtgtcataatggtcattctttctatgccagtttctgttttaggtgatgcaattaatacacaataactttgatgttcactacgtccaacacgacctctaagttgatgtaatgtagataatccaaagcgatcagcatcataaatcatcatgaatgtagcattaggaacattaacgcctacttcaactacggttgtcgacactaagatatcaatatcatgatgactaaaacgtgccattacatcatctttttcgtctgctgacattttcccatgtaataaacctacatgtgttttaccataaaattcttgtagtgactcaaaaagttcaacaacattttgtacatcttctagatgttcagaactttcaattagtggacaaatcacataggcttggcgtcctttttttagttcgcttgtcatttgagctaacacttggtcatactgttcatgtttcgcccaatgtgtaataattggctttcgacctttaggtagttgtttaattgaggacacatccatttctccaaatactgaaatggctaacgttctcggtataggcgtcgcagtcataaacaatacgttggtcatagcacctttttctcttagtaattgacgttgattcacaccaaaacgatgctgttcatcagtaatcactaaccctacatttttaaattgtacatcatcttgaatcaatgcatgtgtaccaattaaacaatcgatcgttccattctctaattgttctagcaatacacgtcttttttttccttttaccgatccagttattaaagccacattcatatggtcaccgaaaagttctgttaaactgtttgcatgttgttcagccaaaatttctgtaggtaccatcagtgcagattgatatccagcagttttgagtgcatacatacaaattgctgctacaactgttttccctgacccaacatcaccttgtaataaacgatgcatgcgtattggcgctttcaaatctctaaatatttcattaacgctcgatttctgtgcatctgttaattcaaaaggtaacgactggataaatgactttactttattaatatcataattaatttcaatggcttcatctgaagctttttctacgcgatttaaccattgcatacgtagttcaaacataaataattcagtaaaagcatatgtacgtctcgcacgcataagcgcttgtttatctttaggtagatgcaacgttttaatagtataatctagtaattccaatttgtacttttgtcttaattcctctgtaatccattcatgtatagtgacatcattaagagattgatgaatcatatcacgcatctgtttttgtttaataccttctttaagtcgatataccggttctaatctcacttcttcagtagaggtatgagtgtcattaaaaaaaatacgattgccattaatttcttgtttagcacgattccatttaccttttattgttactatttgatttaactcaattttcttttttaaatacggttgattaaaaaatacacatttaactgcgatattatcaatcattaaatggacagttaattttgatttattccggccaaaaaaggctaccgtgggtacagaataaatttctcctgctactgtcacagtagattgatcttcagctaagtttaaatctacgacagtattatcttcataacgtgttggtaaatataacactaaatcttctattgtgtgaatgtttaattcatgtagtaaagcaattctctttggtccaagtccttttatagattgaagcggatatggactttcaattaaactaactttcgacattatttctcacctaatatttttaatcttatttatattttatcacgtttattataaatatttagtgataccatcttactatagctcactcgacaaatgaatatcactcgcttcatttaaacgtataaacgtacaacattcacttttaacactaatatcaattatcatacttaaccaataaaaagagatcctacaatgtttcaatctattttaattgattttgcattagctcttcatcttatttaaattttagaagtacgaaatattttatatttcatcaaggtccaaatcaagaacgatttatacatatattcccagttattattactgctgaattatatgatatttttaatcactctttgagtattagatatcttcttaattgttatatcttcctctattttacagttcattactgatagcatatctttctattttactatatattgattggtcattatgtcttgaaaaatctattaaattaagctctccattgtcatatttttcaatacttttcttaaatataaaatggggagtgacaacgacaattatttcatcgttatcactcccactattaaatctcactttattctacagcaaataaatatggataaattggttgatcacctttatggatttctatttcaacatctggatattcattttctatccattcttctaattgagttgtcatatcagattgtgcatcttcaccagttatcactgttaatatttcactttcttcatttaacaatgtacttaataagccagtaatagttttaaattcatctgcattactagtcacaattttactttcagctaatcccataaattcatcttttttaatatctacaccatcaatcttagtatctctgacagcaaatgtaattgatccagatttaactgtttctaacgctgtattcatatgagacgcattttcttctaacgtagatgcaacatcatattggaaaagtgctgcaataccttgaggaatagatgtagttggaatgactactgtgtcagctttaacaagttgtgctgcttgatcactagacattctaatatttttgttatttggtaagataattgcacgctggcattcagactgttcaatcaccttaacaatatcctctgtagaaggattcattgtttgcccaccactaataatgtgtgtcgcacccattgaagtgaacaactcagagataccttcacccattgaaatggcaattactgctgtttcaactgttttaggttgttgcgaagctgttgcttgttgatgactttgttcttttctaattacttcacgatgttgttcacgcatattttctacttttaatttaataagttcaccatattgttgtccataattgaacacttcacctggtgtttctgtatgtacatggactttaactatttcatcatcattaataactaataatgaatcaccaaattcgctcatatcatttctgaatgtttgttcattaaattcttttttatcttttccaaagcgtaccatcatttcagtacaataaccgtacttaatatcttctgtattaataaccccatgaaaatcatgttcttcatgaaccaaatcttctgtgtctaatttttgtttgttagcttcaactttttcgccttttagtccttttaaaaagccttcgtagacacataataaacctttaccgccactatccactacgcctacttcttttaaaactgctaataaatttggcgtattatttaaagattgctcagctttttcgattgtatattccattacttcgatgcagtcatctgtttcttctgctttagtcatagctgcacttgctgcatctttggcaacagtcaaaatagttccctcaactggtttcatgactgctttataagctgtatctacacctgcttgaaaactactagcaaattgttgagcattaatctccttttcatcttcaatatttttgcaaaatcctctaaataattgagataaaataacaccagagttaccacgtgctcccattaaaagtcctttagaaaaagttttacctaattcaccaatactttgagataaattattttcaacttcttcgcgacctgaggtaattgttaaattcatatttgttcctgtatcaccatcaggtaccgggtatacattaagggaatcaactaaatctgcattattagataaattgtgtgccccttgtataatcatatcggcaaataatttaccattaattttgctaatcatcgtgctttgtcctcctataccttcttgcccttgttattaagtcttacaccttgtacaaaaatattaatagaattcactttaatattaagtgaactttcgagtgtatattttactgatgattgtacattgttagctacttcagaaattttgacaccataacttacaatgatgtacatatctatatcaatcacaccattatcttctttaacaacaatgcctttagcataattctcatgtcctaatatttcagcaataccgtctcttacttgttgtctagatgccatgccaacaatgccataactttctacagctttacttcctacaacagaagcaatgacctcatttgagatatcaattttgccatagtcatttaagatttctaatgtcatcttcattatcctcctgaattatggttaaaatcatatttaataaatgatgtatacatatatgataaagataactattttataaataagccaatctacataaaaatatattataataactccacaatagttaattataccatagatttacattttcaaaacaattaacataaattacatatgattttattgctttaaatattgatatatggtatcttatttaagtatataagtagttaagtgtatttatatttattaaaggaggtactttgatgggtaaacaatgttacgtaacaggtcgtaaagctacgactggtaataatcgttcacacgctttaaatgcgaacaaacgcagatttaacgctaaccttcaaaaagttagaattttagttgacggtaaacctaaaaaagtttgggtttctgctcgtgctttaaaatctggtaaagttactagagtttaataaatataatgcactaaaaatgccttcatatgtggtgaaggcatttttttattactctaaatctctacttctcatttgcagtacttgacctttttcaacttcgataattgccattgatcgattgacttcattagaaattgtcagtgtagagcctatttctaagtgctgatgatttaaattatatttaaacccagataaagataatatcacttctccatttactggaataaatgaaacatattgatatttatcagatttatgaagttgatgtgttccggtattaagtagcatgatttcattttgcttatctattactttaattataatttctttttttatatagtctgacttgaaaagaatttgtaatgttcccataaaatgatctaatcttccacccgttgctccgtagatatctatttctgtatatcccttttgaatagcttgttctacgcctaatgctaaatcagtgtcatctttttcagctttaactggatgaatatttaatgttttttttaaaatttctctttcttcatcattgacggagtcaaaatcgcccactgaaaaaacaggtacaatactgtgttcagaaagaattaaagtcccacgatctattccaccccaaggttcagttgataattttgaaaaaatatgaggtggtaaatgacgatctccacatagtaaattaattttcattatctcaacctctcaatattttagtcactgttttataatcatcatggttaaaaaagtatgaacctgtaacaaaaaggttagccccatgttttgcacaaatatctatcgttttatcatttataccgccatcgacttcaatattaaaatttaaattaaaagatgacttcaaatcatttaataacttaatttttgaagcacacatgtcgataaatgtttgtccaccgaaaccaggattaaccgtcattactaaaacataatccaccatggaaagaacaggtacgaccctatctacaggggtgccaggattaattactacacctgcttttttatctagacttttgataagttgaatagcacgatgaatatgaggggttgattcaatatggactgaaatcatgtctgcaccatgttttgcaaatgtctcaatatagttttcaggattctcaatcatgaggtgtacatcaattggtaattgtgtagttgatcttactgcatctaatatgggtaatccaattgatatattaggtacaaattgaccatccataacatcaaaatgtagaccgtcaacgcccgcttcttctaataattgtatttcatgttttaaattcaaaaaatcgactgataataaagaaggaaaaatgtgtctcattaatatctaacctttctattcgaaatttcattaactaattgtaaatagtgttcataacgaaattgtgctaaattattgttttctaattgatgtttaacattgcatttaggttctttaatatgattacaatttctaaatttacaatcatttccaaaagtattaatttctttaaagtaatactttacatcatctttttcaatatgatcaaaatcaagtgcactaaaaccaggtgtatctgctataaaaccattttctctttcaaatagctctacatgtcttgtcgtatgtttgcctcgattaagtgatttagagatatcattggtttcaagatttagttctggtttaaacgtatttataaatgttgattttccaacaccagattgtccacttagcacaattagaccattgggccaagtattcacaatatcaactttatcagtttttttacctacaaattgaacagaatatcctatttccttatatgtatttagtattgtttcgatatgattgatttgcgtttcactagcaatatcttttttagtgactaatatactaggagataagttgtaagaatgtgcaatcactaaaaatctgtctaacaattgtgttgaaaatttaggttcaaccgcactcattacaataatcagaccatcaatattacttactggaggacgctttaatgcattgtggcgttcatgcacgtggtgaatataaccttcatcttcattttgaatgtcaaagtcaacgatatctcctactacaggagaaaattttttctttctaaaaagaccacgaggtttagtattatatttttttccacctacatctacttgatatactccactaattagtttaacaatacgtcctgtttccaaattaacacctcaaattaagtatttatgtttacgttattatagcaaacttagaattaataatatatatattctataccctcatcataaagataaggatagaaagacattgaaatcacttaaaaaattaactttacataataaaattatagttgttaaaaagacaatttctatattatttcaatagaaattgtcttttaaaattaacatcatttatatcataaaatacacgttaatgtataaacagtaaacgatgaataacttatcattactatcttactcttattctgatatttgaaatttattcgtagtcaatatctttatctgcaataacattgtcatctacttcaatcgtatatccagcagaatcaccttgttcaaattttaatggaatagtaatgattttatccttgtgaatattgtatgtttgacttacctgtgtaccactattatttttatctctaatataaatctttaccttttggctttctccatcatttccagtatacggaatatgataagtttccgtataattttttacgcttgtcgtatgattatctttcttatcatcagaagaatccgagtcctcttttgaatctttttttttatctttccccttagaaaccataagttctactgtacttccttcatttacttcagtctgttttggagattgtgaaataatgatatccttatctttagtatcactattagtcgtcttaacttgtacttttagacccctcgactctaattcttttttagcattttgatagtttttattttcatagtctttgacgtaaactttttttacacctaacgattcagtcagtacaatatgatgatcgttaattttcaccgattcattagggttaatattttgcttgaaaatatatccttttggcatttgactattatattcttgattaattgtcacatgatttaatttatgatctttaagtttttttatagcatcttcttttttaatccctatcacattaggcatatttatcttttctggaccttttgataatacaacatctactttttcttgttggttaacacgttctcctgctttaggattggagttaataattttattttcgggatagtcatcattatattctctagatatatgtcctatttctaaatgcgaagcttttaatactttttctgcttctttttcagttttacccgttaaatcaggcatttctgcatatttatcaccaagcatgccccaagcgataaacccaatcaagcttaataataaaagcgctagaataaaaataatagcgacctttttctttttagaacgttttttacgtttaggtgtgtacacattattttcacttgcttgaaatttatgatgattgataataggaatttgcatcgtttgcgctatatcttttttatgattttcttcatcaagtttgttttttatttcttttttatcaatgggtactgtttgggtggtatcacttatacgcgtatgcttttcttcatttaatctgcttgtaacaagcacactactcaaatcattatacatttcttctatcgtttgataacgatctttagggtttttttcagtcgccttaagtaccacattacttaaagattgtggaatatttggatgtttttcagtaatattaggaactgtttcttgaatatgtttaatagcaatacttacagctgtctctcccctaaaaggaggttcaccaactaacatttcatacaacactataccaattgaatagatatcggttgtttcattcgttttatctcctttagcttgttcaggagataaatattgaaccgttccaagcacatgatttgtttgagtcattgatgtctcacttaacgcttttgcgatgccgaaatcaaaaatttttaaaattttatctttattaattagtacattttgaggtttaatatctctatgtataatacgttgctcatgtgcttgttttaccccatttaaaatttgcttaataaaatcaatagctgtttctatattcaatggaccatggctatgtatatactcagatagtgtcggtccatcaatatattccataataagatagaaattatcatcatcttcttcaacatcatatacttccacaatattttcatgaacaatttgtgtagcactatttacctctctgtagaaacgtttcatagtttcatctttttcgttttgtgaaatagaaattgctttaatagccactttacgttcaagtatagtgtcttcagcaagataaacaatactcattcctccgccaccaagtttatctaagagttgatagcgatcattaattagcttgccattcatacattattaccctcaatttcagctaatagtacactcacattatctttagattgatgatctaaggcagcttgtattagtgcttctccaagttcatttaatgatgtagactgattcattaacgtttctatttcatgatttcttacataatctgacagtccatcagaattaagtaataaataattatagtaactgatgcgctttgtaaaaatatcaggacttactcggcgatcagtacccattactttagtgattatattacgttgaggatgattaaacgcttcttcttcagtaatttgtccggtcataagcaaatgattaacaaatgaatgatcatatgtaatctgttcaatttctcttgaattaatcacgtatgctctagaatcaccaatatttgctactacaattttattatcaaatatgagggcacatacacacgttgtgcccataccacgatattcttcattcgttgtagcatattcaaataattcgagattaatatcttttaatgttttacttaaccatgattcagcttggtctaattcaataaagttttctatttcaaaatagtctcgtaattgattagtaacaaattgacttgcaacttcacctgctttatgaccacccattccatcacacaacactaacaattgttgatgtgtttggttataaaatatacctcccgcgtcttcgttcttttctcgatgttgtccagtatctgtgaaaaactgtgcgttaagcatgatgattacctcgtttctacttgtcgttccttagctcttaattgtccacatgctgcatctatatctgagccttgttctcttctaattgttgcattgatgcctaaacgtttcaattctttttcaaatttaaaaatatcatcttttggtgttttaacataattacgttcaggaacatgattgactggtataagatttacatgacagtttaaatctttaattaaatgtgctaaatctcttgcatgttcaagttgatcatttacgcctccaaataatccatattcaaatgtaattcgacgattcgttttttcttgataatatttgattgcttccattaatttttcaacattatacgctctattaattggcattaattttgaacgaatttcatctttagcagcatgtaaacttactgcaaaattaatttgaatttgttcatcagcaaagtcataaatacgtgggataattcctgacgttgatactgtaatatgtcgcgccccaatgtttaaactattatcatcattgactatttttaaaaagtccatcatttcatcataattttcgaagggttcaccaattcccataataacaatttgtgatacacgttcattagtagcatcaagtgctttttgaactgtgagtacttgagatacaatctcgccagcctctaagttacgctttaaaccacctaaagttgaagcacaaaatgtacaaccaattcgacagccaacttgagtcgttacacatacagaattaccgtaatcgtgtctcattaataccgtttcaatggtataaccatcttgtaattcgaataaaaacttaattgttccatctttactttcttgtttaactacggtagttaacgttgtcataacaaagttatcttttaacaattgtcttaagtctttagataaattagtcatctcatcaatagtgtctacacgcttttgatataaccattcaaaaatttgtttagctctaaatttttgttgtccgtgctcaattaaccaattttgcatttcatcatatcttaacgaatatattgattgtttttcaaaatttggtaagaatttattttttttctttttttcagcagttatcatcttaactttcctttctttttattttagtaatgaaaaagccatctgaattaaagtcttgtggcaaaatttgtagtgtttttactttttcaccagtaacaggatgcgtcatcaattcaaattcaaaatctttattttcttttaaaaatgtataaattacattttcattttccatttgttcaattgtgcaagttgaataaataagtgaaccgcctggtttcaagttatgtttaacattatctaatatacttaattgaatttctacaagatcattaatactatccttagattgtacatatttaatttcaggcttatgtcttaatacacctaatccactacaaggtgcatctactaaaattttgtcatatagttctgaatatgattgtgttgcatcatggtcgaaagtggacacattctttaattttaactttttgatattttctttaattaaaccaattttatgcttatgaatatctgtagcatctacatggcctgtggatgctagtaattctgccatatgacaagccttaccgccaggagcactgcatgcatctagtatggtatcgtctttttgaacatccattaaatatcctactaacattgaacttttatcctggatggaaataagtccatctttaaaagctcgagattcaatcactggtttacctgtaaggtgtaaacaatatggaatgagttgatcgatatccacatgatagccttcttgtaaaagctccttacttattgtttcaacatccgtacgacttgtattcactcttactgtacttgcagattgtactagaaatgattttgcaatcttatgtgtcgtttctattccgtaatgtgtaatccaatgctcaataatccatcttggtatactatattcaatcgtcatacgttgcttttcattcttaattgtttccaatgtcggtaagtcacttttaaatatgtgacgaagtatagcattaacgatgttcccattgtgctggccaccacgacgtttagcaatattaactgcttcatttataattgcatgattaggtattttatctaggaagacatattgatataaactcatccataataattgacgtacccaacctttaattctagtcttaacaaagggttttaaataaaaatctaaagtcattttacgctttattgttccataaactaattctgtaaacaatgctttatcgacagttgcaatattatattggttaatgacttcgttaatttttaaattgctataagcattatcgtttaaaatatcttgaatggtatgaaatgcaaggtctcttactgattgtgtcatactaatttagtccccactaatgaatcttgtacaccacttaaatattgagcagcaagcattcgttttttcccagataattgaatatctgttaatgcaatagcatccaaagagccagttcctacaataattgcagtcttagtgatttctataatttcacctggttctccgttttttcctttttcaatatgagcttgatatagttttaaatttttatcattcatagttgtataagccactggccatggtgataatccgcgaatatgattgtgtatctctttagcgcttttagtccaatcgatacgttcatcttctctgctaatattagacgcaaacgttgcttttgaatcatcttgtggaatactttcatttgaaccatctataatagaaggtaatgtttcttttaataaatctgcacctaaaaagcttaatttatcgtgcattgatcctacattatcatcatcttcaatgtcgatggccttttgagaaataatattacctgcatctaactttttcaccatatacatgattgtaatacccgtttgtgcttcaccatctataatggcttggtgaataggtgctccaccacgatattttggcaataatgaggcatgtacatttacagcacctaacttaggaagatttaatagactttcaggtaataattgtccaaatgctgccgttacaattaaatcaggatttaaatccataagttcatttaactcattagaatcttttaacttttcaggttgatatactggaatgtgatatgtttctgccactttctttacaggaggaggggttaatacacgcttacgtcctactggtctgtctggttgagtaactactgcgatgacttcatgttcagcgattaacatctctagtacttttgttgaaaaatctggtgttcccataaaaattatcttactcattgtcaaaatatgcctccacttctttttcagtcaatatttttgtagcacgttcggtaaatggaataccatctaattgatcaatgatgtgcagtatcattctagccacatcatcataagcagttaattcaatctcgtgaccttctaaatcatttgcttctacagttatcattttactacgttctacctccccaaatacattaggaagattaaccgaaccttctaaatcaatgattttttcattagattctgttttgattttaggattgattaattgcaagagtccttccgcttccatgtcaattatagcaacacgttgacttacaccaatttgtggcgctgataaagctgatgcttcttcagaatataaagtgtcttcaatatctaataataaacgttttaaattttcatcaaaagttgttatcttttttgcttttttagataaaacaggatgagtcgatggaactaatttctttattgccacttagaacgcctcccgaaaaaaattcatcatattattataacgtaattcaatttaaaatgcgaccttagtcttatcttcactcttctcagataactttaattgcttttaatttttttcatatctaaaataattatgaagacaattaatatattaaatagactaaggaggtataaagaatggaagtcaataaagtgatttacattatcctagctgtctttttaggtggctttggcgtacacaaattttatgctggtaaaatgatgtctggtcttcttcatttattattctgttggacaggaattcctcatattattgcaatcatcagtgcgattctgacattactaagaccagcagatgaaaatggaaacgtaacaatgtaacatgtaaatacaaaaagagttacaccacgcagttaaacgcaaacggtgcaactctttttttacattaatatttgaggattgatatcaatccttaacgataatttatctttaatatatgcttcatgataataatcatctaagtactgtaatgcatgaattaattctggctcactcttgtatttaaccaatatttgaaaacgatgttcgttattaattctagcaattgccgctggagaaggtccaagtacgagtgctctttctgaaagatgttgcagtaaaatttgatgtacatgtttagcagcttccattacttttttcatatttttatgcgcaatagtaaaattaattaaataataataaggtggatatttacctaattttctaaattgcatttctttatgataaaacgttaaataatcatttttttgaacatcttctattgcataatgagttggattatatgtttgaataatcactttaccgggtttttcatgacgaccagcacgacctgaaacttgtgtaagtaactgatacgttctttcactcgctctaaagtcgggcaaatttaacattgtgtcggcattaagcacaccaactaatgttatatttggataatctaaaccttttgcaatcatttgtgtgcctaataaaatatcgccttttcccttttcaaaatcagtcaatagcttttcatgtgcaccttttcttgacgtcgtatctacatccatacgaataatacgtgcctcttcaaattcttgttgtaaaatttcttctaccctttgtgtacctgtaccaacctgtctgatatgcgggctttcacaattaggacacaggttaggaggcaagtcttgatagccgcaatagtggcattttagttggtctgtcgtcttatgataagttaacgaaatatcgcaatgtggacattgtggaacatatccacaatctcgacataacataaacgaagcataaccccgtcgatttaaaaataaaacgatttgttcatttttattcagtctatcatgaatcgcttgtcttaattcttcagagaacatggaacgattacctgaacttagttctgctctcatatcaatgatatctattgaaggtaaagcttgttgattaactctttcaggtaaagtaagtaattgatatacatttttttctgcccgtgcataagattcaagacttggtgtcgcacttcctaatactaatggacattgatgaaattgacttctccattctgctatgtctctagcatgataacgtggataatcttcttgcttatatgttgattcatgttcttcatcaataataataatgcctaagtttttaaatggtgcaaagatacttgatctcgcacctacgcttacacgtgctcttccatctctaattttttgccattcatcatatcgttcaccatttgacaaacctgaatgtaagacagctacatcatcaccaaaacgtcgcttaaagcgtaaaaccatttgtggtgtcagcgcaatttctggaacaagcatcatggcttgttcatctttttttaatacttcttcaatggcttgcaagtagacttcagttttacctgaacctgtgacgccgtgtaataaaaatgtacgttgtgcgttgtgatctattttttctttaatttgttgaaatgcgttattttgatcaggggttaacattcgtttttcttctttttcaaagatacgatttgcaaaaggatctcgttcaatttcagcatcatatttttcaaggaaaccttttttgacgagaccctctatacttgatttagaaaaccccatttcttcaagttcttttaaaaatacatttctatgatgttcttctaaaagataagcatacacatcatattgttttaatttcttttctagtaaagctaatatatcatctggattgtatccttcaacaactcgtactgcacgctgtgtttttctttttgtatgttgagataatatggtttcttcttctattaaatgttgttcaagtaaacgatttaatatatttaaatgattatttttttgcgcatctttatacttataatatccgttgttatcaaaatattttaatatatcttcttcaatatcattgtgacggactattttaaatactttagtgtattttgctttaatcgcgcttggaagcattgcctctaacacagaaatgcgttttgaaatatgataatgactcaaccattcacttaattggataagttcaggtgttaattctggtcgaatatctctattttctttaattgctttcaatttatctatattgacatcttcacttggttgttgttgtatatccataacatatccttgaatggtacgtggaccaaacggtacaacaactcttacacccacttttataaaatcttttaaatggtcaggtacgagataatcgaatttaaaatcaacactcttagaaggaatatctacaatgaccttcgcaatcattattgccacctagtttccagttcatctaaaatttgttgtgcaagttgcactttctttcctttttttatattaatacgttgtccatctttaaaatgcatagtgagttcattatcatcagattgaaatccaatggtctgatctcctacattattcgaaataatgacatccgcatttttacgttttaatttatcttgtgcataagcattaatattttgggtttcagctgcaaatccgaccaagtattgatgtgttttatgttcacctaaatatttcaaaatgtcctttgttcgcttaaaagtgacagaaagattgccatcttgttttttcattttatgattcaatacatcagccggcgtataatctgagacggctgctgctttaacaacaatatcttgttcttcatatcgacttgtaactgcattaaacatttcttctgcactttctacatgaatgacttctacattctctggattatcaagttgcgttggtcctgccacaagcgtcacctttgcacctcttttagctaaagcttctgcaattgcatatcccatttttccagaggaacgattagatacaaaccttactggatcaattacttcaattgtaggaccggcagtaactaaagcatgtttcccttcaaaagaagtatgagatatgtgtgatagttcattcttatctttaaaataatcatttatgattttgacaatttgaagaggttcctccatacgtccctttgcaatgtacccacatgctaaaaaaccatctccaggttcaataaaatgatattcatcgtcttttaatacagaaatattatgttgcgtacgtttattttcatacatatgaacattcatagctggagcaataaatttaggggtttctgtagcaagtagcgttgatgtgacgatatcatcagcaatacctacacttaatttggcaatagtattagcggtagcaggtgcaacaacgatacagtctgcccaatcacctaatgctatatgttgaatgtcttcaggattttcttcaataaatgtattggtatatacagggtttctactaatggcttgaaaggctaaaggtgtaacaaattcttgtgcatgatcagtgagcattactcttacatcataattcgcttgcgtaagtttactagttaaatcaattgctttataagcagcaatgcctcctgtaacagctaatagaatgttcttcatgattcgactcctttagttatatttatagtcttcacttttaaatttattatacacaactaagatgaaaaactaaaaacacgggagtagaacagatttttaattcactgttctactcccgcaagattaactgattctaaaaacgcttatataagtacattttcaattgaatcagagattgcaaaaatgtttaaaagtctgaaatacatggtaacttatatttcagaacaacaacttaactgataacaaaataattttatttatgcttgaaactcttcaggtacaacaggtgaaatttttccgcttgcgatctcttctagtgcttcacctacaggttttgctgaatgataaccctttagtaatgcagtttcaggcttttcgtctaattcacgtgcacgtttagcagctgttgttgcaattaaatattttgaattaatttgtgattgtaattgatttaacggtgggtttaacattatttctttgcctccaataacatttttctatatatcgcttcaacgcgttctctttttaagtgctcggcttctacaattgattgaattctttctttagccaaatgaacttcatcattaacaacgacataatcataaagattcatcatttctacttctttacgtgcttcatttaccctactttgaatcttttcatctgtttctgtaccgcgaccaataagacgttctttcaaatgatctaagcttggcggtgcaagaaagataaataatgcgtcaggaaatttttttcttacttgtttcgcaccttcaacttcaatttctaaaaacacatcatgaccttcagccattgtatctttaacatattgtacgggtgtcccatagtaatttcctacatattcggcatattcaataaattgatcttcttgaattaatgcttcaaattcttctttcgttttaaaaaagtaatctacaccgttaacttctccttctcgcatttgacgcgtagtcatcgagattgagtatttatatgatgtagttggatcgtcaaatatctctttacgaacagttcctttacctactcctgaaggacctgaaagaacaattagtaatcctttttcattatccatgccttacgacctctctaagctattcttctattatttaaatatgatatcacattgttgtttacgttgtatagagtgtactaggataaacttaactcatgacgctctattgttaccatgttacaatataatgaatgacaaaactgaaggtggaaaaaattatggcttatgatggcttatttacaaaaaagataatagaatcactacaatttttagtaacaggtagaattcacaaaattaatcaaccagaaaatgacacaatcattatgattattcgtcaaaatcgtaaaaaccatcatctattgttatctattcatcccaatttttcaagaatgcatctcaccaataaaaagtacgacaatccctttgacccaccaatgtttgcacgtgtctttcgtaagcatttagagggaggtattgttaaatcaatacgacaaatcggtaatgatcgtagagtagaaattgacattgaaagtaaagatgaaattggcgatacgatatatcgaacagtgatattggaaatcatgggtaaacatagtaatttaatactagtagatgatcaatataaaattatagaaggctttaaacacttgacgccaaatacaaatcagtatcgtacagtgatgcctggtttcaaatatgaagctcctcctactcaaaacaaacgaaatccatatgatatttcaagtgatgaagtgctcaaattcgttgactttaattccggaaaaattgctaaacaattactcaatgcgtttgaaggctttagtcctctaattacaaatgaaattacaaatcgttaccaatttatgaatcaagatactctacctcaagcttttgaagaagtgattgaccaaacattaaaagtacccgtaccagtatttcataaaaatcatgaaacaggtaaagaagatttctattttatgaaattaaaacaattctcggatgatattgttatctatgattcattacatgatttgttagatcgttattatgatgctagaggtgagcgagaacgtgtaaaacaacgtgcgaatgatctagtacgcttcgtacaacaacaattacaaaaatatcaacacaagttaagtaaacttatagacgaatacgaaagtgctaaagataaagacacacaacaattatacggtgaactcattactgctaatatttatcgtattcaacaaggtgacgcgtctataaacgttctaaattattatactaatgaagaagtaacgattccattagaccctactaaatcaccatctgtgaatgctcaatactactataagcaatataatcgaatgaagacacgagaaaaagaactcgatcttcaaattgctcttacacgtgaaaatattgactattttgccaatattgaacagcaattagaacatattacagttgatgaaattgatgacattcgtgatgaattggcagaacaaggatttatgaaacaacgtaaaaatactaaaaagaaaaaacaagataaaatccatttacaaacatatatctcttcagatggagacacgattttagtaggtaaaaataacaagcaaaatgattatttaacaaatcgtaaagctcaaaaatcacatatatggttccatactaaagatattccaggttcgcatgttgtcattttaaatgatgcaccgagtgagactacgataaaagaggcagcaatgcttgcgggatatttctctaaagctggaaattctggtcagataccggtagactatacagaaatcaaaaatgtccataaaccttctggcgctaaaccaggatttgtcacatatgataatcaaaaaacgttatatgcaacacctgattatgaccaaatccagcgtatgaagcaggataaaaattaaaaaaataaaaatccgtagatgctttttttaagtcatctacggattttatatatcatagtgtctatttttctggtaatgcaagttggaaacttactccaaatttatcttgcacccatgcaaactcacgaaatggtggcatagaagttttaggcatcagtatagcaccttctttttttagaccattaaataaacgttccatttccatagcatcttcaacagtgatatataaagagatggaaggattcattggtaattcttcaccattatcggcatctatcgccatgaatacttgaccatttaatgtgaaaatagaatgttgaactgtcccaggttctccaggaccatcttctccgtattttaccattgttaaaatctcactgtttttaaataagcttgtatataaattgactgcttcttcagcttgattattaaacattaaaaatggtgttactttaggtatttccattgtaatcctcctataatttataattaatgtctattttaaactatttttaaaaataataaaaagttagctattaagaactttgaattaaaagtagctttaattttgaaaactttccataaacagttaaaattaaataaaagtataataggaggcatttaatatgatgcattatattctaccactattagcaatggtcatcgttttattaatcggatgggtgttaattaaaatctttatacgttaagttaattatagattgatataaaaagatacatataaatatgttgattcatatttatatgtatctttctttctatatttagattttatctttttgacgtaaacgtgctttggcttttttaaagaagtcacttgtatgctcaaaagattccatttgtgcgtgatgcatatgtttaatactttctttaatagttaacacatgtgctgtttgtttaaattctttttcactgtataaaaattgattcacatgttttaactgattataaaatgcattattatctttgtctttagacaactttatcaccctttaagcgaaacttagagattatcgcgccaatccactaatgtttgaatatcattttctgaaattttgccttcttctttagctacttcaataagttcattataattacttagcgtatagaatggtagattcgcttgtttgaacatgtcgtctgctttagctagaccataagtaaagattgcaactacacctacgacttcagcccctgcttctcttaaagcttccactgcagtaattgacgatccccctgttgaaattaaatcttccacgacaacgacttttttatttttactttgtgcgccttcaatttgattttgtttaccatgacttttacttttagatcgtacatagttcattggtaagtttagtttttcagaaatataagcagcatgtggaataccagcagttgctgttcctgaaataacctctacattatcaaaatgttctgtaataagttcacttaatccatcacgaatgtcttgacgtactttagggtaacctaatgtaatacgattatcacaatagataggtgattttatgcctgaactccatgtgaataagtcattgggtgataaacttactgcttcaatatctaataatgattttgctatgtgttttgacatattaacttaaccaactttcctttatttttgtataactctcttgtggatgctcactttgagttattggacgacccactacaatgtgagttgaacctaattgtttcgcgtcttctggagttgtaatacgtttttgatcattcaccgctgcacctttaggtctgataccaggcgtcacctttaaaaagtcagaacctagagactttgtcagtaatttagcttctaatggtgaacatactacgccatctaatcctgactcctgcgctaattttgcataattcaacactgcttcttcaatagacgtttggatattttgttcttgatgtagcatttcttcagtcgttgatgttaattgagtcactgctattattttagtagtttcattatatttacgtaacccttttacagcatgtttcatcatttcagttccaccagcagcatgcacgttaactaaatcaacatttaacttacctaaaccctccatagctttttgaactgtattaggaatatcgtgtaacttaaggtctaaaaatatatcatgtccacgttcttttattttcttaattaaagctggtccagtttgataatataattccattcctacttttacaaaaagtggttcatcaaattgatctaaaaaatcaagaacatgatcctcagaatcaaaatctaaagctataattggtaaatctctcattcattaaactcctttaaataactcacttttattttaaaaagaagcgacttgtgcttaaacataaagcaagttaacacataagtcgcttataattacggcattacatatttctcattgaaaatgtcatactttcaatgacatttgttaatgcacttgcagtatctaatgaagttaaacatggcactccgttttctacagtagtacgtcgaatttggaagccatctctttcaacttctttaccttttgtcattgtgttaataacaatttgtacatccccattttgaatacgtgttaataaatcatcttctccaccgattttaccaacaacttcaacagggatattgtgcgcttctaatttttgtgcagtaccttgtgtagctaagattttataacctacttcatttaaacggtgcgcaatatcaacgatttcttctttatctttatcacttactgtcattaatacggtaccatgatcttttacttctacaccactacctgttaaacctttatataaagctttttcaagtgttaaatctttacccatcacttcaccggtagatttcatttcaggtccaagtgtcacgtcaacattttttaatttattaaaactaaataccggtgctttaacaaacacaccctctgaatatggttgaataccttgttgatagcctaaatctttaagctttgtacccattattgcttgcatggcaagttgtgccatttgaatatcagtaattttacttaagaaaggcactgtacgacttgcacgtggattaacttctaatacatacacaccatcatgtgcaataacgaattgaatattgatgagacccacaatgtttaatcctttagctaatttaattgtataatcttcgagagtttttatttctttatcgctcaatgtttgtggtggatacactgcaattgaatcaccgctatgaacacctgcacgttcaatgtgctccataataccaggaataataactgtttcaccatcagaaattgcatcgacttctatttctttacctgttaaatatctatccactaatactggatgttctggacttgctttaacagcttgttccatatagtcttctaattctgcatcactatttacaatctccatggcacgaccacctaatacataagaaggtcgtacaactactggataaccaatttcgcgtgcattttctaatgcttctttaggagaagtggctgttttacctttaggttgtggcacatcaatttttcttaaaagtgcttcaaattcttttctatcttctgcacgatttaaatcttctaatgatgttcctaagatttccacaccatgtttagctaatttatcagctaaattgattgctgtttgaccaccaaattgaactactacacctttaggttgctctaaattaatgatattcattacatcttcttcagttagcggttcaaaatataatttatctgaaattgaaaagtctgttgatactgtctctggattattattaacaatgattgcttcatatccggcattttgaattgcccaaactgcatgcactgtcgcataatcaaactctacaccttgtccgatacgtattggtccagaacctaatactaaaattttctctttatctgtaactatagattcattttctgtttcatatgttccgtaatagtatggtgtagatgattcaaattctgctgcacacgtgtctaccattttatacacaggtttaatatcattatcttgacgtaattgatatacttcttcttcagtcatatcaaagcgatgagcaatcactttatcactgaaaccataatcttttgcatatttaagatattctaagtctcctggatgcgctttaagttcatgttcaatatgaataatattaaggaatttatttaagaagaaataatcaattttagtcatttcatgaatttcttgtaatgatgtgccacgtcgaatcgcttcaccaataaagaataaacgctcatcatcttgatgactaatacgttctttaatgtagtctaagtcataactttcaccgtttggtaaaccaagatgatggacaccatattctaatgaacgaatcgcttttaataatgattcttcatatgtacgaccaatagccatcacttcaccagtagccttcatttgtgttcctaattcacgttcacctttttcgaatttatcaaatgggaaacgtggaatttttgaaatgacataatcaagtgttggttcaaacgcagcataagatgttccagttataggatttagcatctcatctaatgttaaaccaaccgcaattttagccgctaatttagcaattggatagcctgttgcttttgatgctagtgcagatgaacgagacacacgtggattaacttcaataatgtaataatttaatgaatatggatctaaagccagctgtacattacaaccaccttcaatacctaaagcacgaatcactttaagcgatacatcacgtaacatttggtattcaacatctgatagtgtctgactaggagctacaacaactgaatctccagtatggatacctactgggtcaatattttccatattacatactacaatggcattgtcatttttatcacgcatcacttcatattcaatttctttatatcctgctattgatttttcaattaaacattgagtcgctggactataatgtaatccattacttacaacttcttttaattcttcatcattatgacagataccaccaccagtaccccccattgtaaaggcaggacgtacaattaatggatatcctacttgttctttgaatgcaaatgcttgttctacagtatttactatatcactttcaggtaccggaacatctaattcattcatcaatgatcggaataattctctatcttctgcttgttgtatagattctaattttgtacctaataactctacattatttgcttttaatacaccgctatcatgtaattgtattgccatatttaaacctgtttgtccacctaatgtaggtaataatgcatcaggttgttctttacgaatgatacgtgcaataaagtcatgagttaaaggttcaatatatactttatctgcaatttctttatcagtcataatagttgcaggatttgagtttactaaaataacacggtatccttcttcttttaaagcaagacacgcttgtgttccagcatagtcaaattctgcagcttgtccaataataataggacctgaaccaattactaaaatcgttttaatatcgtcacgtttaggcattcgttttactctcctttttattatctttaaaatctctcatcatgtctaagaactcatcaaataagtaatttgagtcacttgggcctggtcttgcctctggatgatattgcactgaaaaggctggtaatgttttatgtcttaatccttcaaccgtaccatcatttaaagcaatatgtgtcacttctaaatctgtattttctaatgagtctttatcaatagcataaccgtgattttgacttgtgatatcgactttacctgtgcgtaaatcttttacaggatgattcgcaccacgatgtccgaacttcatcttaaatgctttggcaccttgagataatgcaaataactgatgaccaagacaaatgccaaagaatggtatatttcctaaaacacctttaatcatatctaaggcaacattaacttcttctggatctccaggtccatttgaaagcatgacaccatctggtgacattgctaatatttcctctgctgaagtatcataaggtactacagtaacattacatcctcttgaattaagctctctaacaatattttgctttttaccaaagtctaataacacgacgcttaaatctgagcctgttgatacatacggtgtttttgttgacacagtaattacctcatcacgaggtaattctgcagtttttaagttagctgcaagtgattcaatttcctctttattgtcagtaaatcctgcttttaatacaccatattttctaatttttctagtaatactgcgtgtatctacccctgaaataccaggaatttgatattgaacaagcacttcatgtaatgttttttgttttctaaaattacttggatgcgtacttgcttccttaaccactaccccatttaatgtaggtgtaagtgattcaaaatcgtctctattaataccataatttccaattaaaggataagtaaatgtaacaatttgaccagtatatgatggatcagaaatcgtttcttgatatccagtcatcgctgtattaaatacaatttcaccgattgataattgatctgaccctaatttatatccttcataatatgaaccatcttcaaatacgagatatctacgttcaaacattttacttgtcctccttaaatttaacttcaccctcaaccattgttaaaacagggttaccatatactttatatcctataaatggtgtattatctgctttagataagaagtcttcaccacgaatttctctttcttcatctaaattgatgattgttaagtctgcatagctgccttcttctaattttccataaggtaaatcaaatatttgtgctggtttaattgttaagtaatcaacaagttgttgtaatgaccagtctccatttttaacaaaatgagtatataataatgggaaggctgtttcacttcctacaataccaaatggtgcttttgtcattggctgagctttttcttctttggcatgaggcgcgtgatctgtagcaatacaatcaatggtaccatctagtaatccttctaataatgcatctctatcttctttacttcttaatggtggattcattttaaaaatggcattatcacctggaacatcatcttcagttaataacagatgatgtggtgtcacttcagcagtaacatgaatgcctgctgctttagcatcacgaattgctcttacactttcttttgttgaaacgtggcacacatgatagtgacaatttgctgcttctgctaataaaacgtctcgtgcaatttgtacagattcacaaatgtttggaatgccaggaatacctaattcttcactacgtttaccttgatgcattgcaccaccataaattaagctattatcttcacaatgagcaacaactgctttatttaattttgcagcttgttgcatcgcttcatacatcattgctgactcctgaacacctacaccatcatctgtaaatgcaaatgcaccctcttttgaaagtgcttcaaaatcaacatgctctttaccagcttgacgaattgtaattgatgcataaggtaagacacggacttgtgcattttctttaattaatgattgcaactgatccatgtgttctactgtatcaggtacaggacgtgtattaggcataggacatactgttgtaaacccgccacgtgcagctgcttttgttccagtttcaattgtttctttatgttctccacctggttctcttaaatgtacatgcacatctactagtcctggtgctacaaactgaccatttgcatcaatgacttcagtaccttcatcaatattaatattttcattcatttccttgatatattgtccatcaattaaaattgacgttgatttaagttcaccattgtctaaaattttagcattttttataagtttcataattattctccttttcttgataaaagtttatctattacagccattcttaaatacattccattttccatttgtttaaagattcttgacttaggtgcttcaactagttcactatcgatttctacgccacgatttactggagcaggatgcatcactatcgcatcatcttttaaacgacgatacctttctttagttaacccatattgttcatgataatgatcagctttaaagtttgcttcatcagtaataccatgtctttcatgttgaactcttaaaagcataatgatatcaactttatcaatcacatcatcaatatttacatagggagcatctaatgtttcatctacccattcattaggacttgagaacattactttagcgccaagtgaggttaaacttgtataattacttcttgctacacgagaatttttaatatctccacatattaaaatatttaatccttcaaacgtttcgtattcttcataaatcgtcattatatccaataagctttgagtaggatgctgaccactaccatctccagcatttgcaatcggaatatttaaattttctagttcttcgtaatatgcattttgaggatgtctaatgactaataaattgacgccaatactctctaacgttttacaagtgtcataaagtgattctcctttttgtactgaagaagtgcttgtttcaaagttaacttgtttcaatccaagattaagttcagctacttcaaaactgcattttgtacgtgttgaattttcaaagaataagttagatacatattttccttcatactgagggacaatttcttttcctgatttaaaacgactcgctgtttgaataagattaaaaatatcgtcgtttgttaaatattccattgaaaataaatttttcatgacctgcctcctaaaagatcctcttttatttaatgtctgattcttctttttcttttggcaaaataagatttaatatgattcctgataatgctgctaaagccatgccttcaatttgtaggttcacaccaagactttttaaattgataagtaaatttccaataccaactactagtactactgatgcaataactaaattacgattactagcaaaatcaacacgactttctaccaacattctaagtccacttgctgcaataataccgaataataagatagatacaccacccataactggtgtaggaattgatgaaattaatgctgagaacttacctataaatgataagataattgcaatcattgctgcgccaccaatgacatagatactatatatttttgtaattgcgagtacaccaatattttcgccataagttgtactaggcggtcctccaataatactagcgaacattgttgaaacaccatcacctataattgaacgatgtaaacctggattttcaaagaaattacgtcctacaattttattaattaccatttgatggccaatatgttcactgactgttacaaatactataggcaacatgactaaaataagtccgatatgtatcgatggaacataatctttaaatggtaaatatatatctggaaaatctagccaactggctttagcaattggtttgaaattaacaatgcctacaaaaattgacacaatataacctacaataattcctattaacacaggaataagagaaaggaagcctttaaagaatccttgaacaataatagttacaagtaaggttactaatgctactaataaatagcttaaattgtaacccttcatatctcctgaattctcatacattgccatgtttactgctgttggtgcgagacttaaaccaatgaccataataactggaccaacaacaactggtggtaaaagatgcatcaaccaaccggtaccacttaattttatgaagataccaataacgatatacattacgccactagcgaataatgcgacaagcatatctcctaaactgtgtgtacttaaccccgtaataattggagtaataaatgcaaagcttgaacctaaataggcaggtatctttgctttagtaattaatatatatagtaatgttcctatcccagatgctaataatgctgcagaaataggtaaccctgttaaaaatggaacaaggacagttgaaccaaacattgcaaatagatgttgtaagcttaaaaacgcccattgtgctggttttggtttatcttttacatctagtactggtttgacagtacgttcaaacatttgctcattttccatgaaatgttcttcctttctaaaaaagtctctttacactatggtaaagagactaaaataaattaatgaaatattataaaaagcttctttaagttttttataacatgacataggaaaagtatttaatttaagtgagacatatcatctatccaattaataaatacattacacgctcaccattaaatactttacctttttcagtctctcgtactggtttaaaaggttagttattcaattactactgcatttctatcatctatttcttcaagataaacagatactgcttcatcttttgcagtaggtatattctttccaacaaagtctgctctaattggcagttcacgatggccacgatccacaagggcagcgaggccaatttttataggtcgagaatgtaataaaattgcatctaaagatgctctaactgttcgtccagtataaagtacatcatcaataatgatcactatcttatctgtaacatcttgatcaatttcaatggcatctttagtgataggctttttcgagttttcaatatcatctctaaaatgagtaatgtcaatcgtacctgttggaactacatgatgttcaatttgtttaattttttcttgaatacgacgtgctaaaaattcgcctcttgttttaatacctaaaagaacaagttgttcagttcctttattatattctagaatttcatgtgctatacgtgtaacagtacgttgtatagctgcttcgtccataataatacgttctgacatgattacacctcttaaaagaaaaaacctcatgccttttacaaagacatgaggtttaatgtatataaaaatattttatatgattcgtctgataacaatcgaacaattaaagttaatcatatttatatcattagtcaccctgtcttttgagcctctctggactctttttaaaagacactgttttgtttaattttaactgttattagcttaaatctttttagttcataagtcaatatgctttcttttaatttacgactttgttctctaattttatgattctcttaatcgaatatcttctaatagcgattgaaactcttgaggtaactcagcatgacgttcaatatattcatgagtgacaggatgttcaaaaccaataactccagcatgtaaagcttgtccaccaatatctaatgtttttctaggaccatatttaggatctccaacaagtgggaacccaatatatttcatatgaacacgaatttgatgagtacgacctgtttctaattgacattcaattaatgtatagtcattgaaatgttctattacattaaaatgagtcactgcttcttttccatcatcaacaacatccatagattgacggtcttttttgtttctgcctattggagcatcaattgttccataatcatgagggatattaccatgtactaaagctgtatacttacgctttactgttttatccataagttgttctactagaccacgatgtgctatatcatttttagctaccataagtaaaccagacgtatctttatcaatacgatgaacaataccaggacgtatctctccattgatacctgataaatctttaatttgatacattaacccattaactaatgtacctgtataatgacctggtgaagggtgtacaaccatgcctttaggtttataaacaatggctacatcttcatcttcataataaatatctaaattgaggttctccggtaaaatatcggcttcaaccacttctttttcagtcacttgaatctcatcatttaatttaattttataatttgatttgattattttaccattaacagtgactaaatcatttttaatccaatcttgaagttgacttctagaccactcactattgaaatcagataataatttatcaatacgctgacctacgagtgcttcatcttctattttatattcatacgtttccactacgtgccctcctattcttttttagttgcatccttaaccaatgcaataatgacaaaaataacaccaattgttaagcttgaatctgcgatattaaaaattggaaaatcatatccaaaaatatttgtatcaatgaaatcaacaacttcaccattgaataaacgatcgataaagttacctaatgcaccagcaaataataagctaattgcaacttgcataaacgcattatatttagtttctttaatataaaatataataagtacagctaaaataataagagtaataatatagaaaaatcccattttaccacttaaaatcccccatgctgcaccattatttctatgtgatgtaatatttaaaaaatgaggaatcacttcataagaatcaccaatgttcatggttgctgtaattatttttttagttaattggtctataattaaaatcacgatggctactattaaagataaaccaatataatatttctttttcattcatgtgcctccattcagccctcaactctttgacaacactctacattatagcctactacttagcataaaaaaagctacaatcttctatgtcatatttgtgttacttttaggatgaatataattaaattgatcgacttgatcaacatctacaaaacgtgttgtaatttcgtaaggttttctgaaattcatatcagagactattaaagagccatcattattgacttgttctacataagcaacatgtccatgttttccttttggataatgtaaaatagaacccttagttggattttcattgactgtatacccttgtttcttagccttatttgcccaatgtttagcgtcaccccattggttacttattaaatgatggtcttcttttactcgatcaaatacatagtaagtacattgacctttagcgtatgtgttatatttcataggatttttttcccaaaaatgaattgtaggttcagtcatatcttgattgtctagaccatcaaaaactgcaccggccgtaaatatcatgcacacaaacaccattaaaaaaatccattttttcatttcatcactctacctctataaaattaaatctaaactggataccatctggaccttttatattgatatgatgtgtttctggataatgaaagtcaacgatagataaaccataagtatgttcattatctattcgctttatttttgaattccattgattcattgaaagatgacaataatattgttcagaagctaaataaaacgattcatcatctaaatatgcagaaggtactagtccaaaatggtttaaataatactctcttacttcatttaatcgaatggtttttaaactaatattcccaattttactatcattaggtaaaccttgccatccgatggtggatgcatatggtaataatgaagaaacatcgagcggcttaatattgagtctaatccattcactttcttgtttccaatcagaaatcgctttatcaacataaaatttaaacatatgaccttctggatcttcgacaaaaataaatgtacatacattttgttctccaccattaattggtaactcataatcatttaacttttcgattagatctgccagatgttgtttattggataattgaattcctatataaaataaaccagcttcttgagataaaggatttcgtccagactttatctctcttaaagtaatataatggtgactgtctccaacttgatatttgacagcggttaatgtctcttccacttttttaaaccctaataattcttcatagaacggttgtaaagtacgtaaatctcttacatttaaagtgataccattaataaaatgtgcatcattatcatgaaacataggacacctcctaaattttaaaatctctctttcaatttaaaaaagctatgattaatgattattctataataaaatatttaaaattttatcagtcttaatgcgtaatattcaactatttagactaaaaaagctttcgatagagagaacttcattgcgtgtccatcgaaaacttttaaatatatataaagtacattattttttagctaaaactttattgtagattcttgtaccaacacatgcaccaatcattacaccagtagtcatagcaagattagtaaaaattttattaacggaatcttgtttatctttttcataactagctaaatgattcatatgctgtttgaatacacccatcacaaacttatgtgcaatggcttgagtaaacttataaactccccatggtaatgttgattcatattcttgcaacgctgcaataccttcgttggtatctaatatacgtctaaattcaaatcgtgcattaccactgtctttaaccatagctaaatctccaccaacaattttatacacactcatttcattaatagaatcatgattatctcttttcatttttaaaatacatttccttattaatggtaattgaatattaaattcatgctcattaatggtaccatttactaaatggagcgtgatattattaataaattctgcatattctcttgttacatcctgtatcgaataactttccggaattctaaaacgcgtcattgctctaacatctttaacttcatctctcttattttgatttgatttagatttagattgttttgtagttattatttgttgttcatcttgtttttctttaagtgcttttttcacattttctttaccattcattttctctttaatccaacatcgacttaaccgaataaggatggttggtaagtgcaatataaacaaacgtttatcaagagtagtcgctatacgttcaaataattcttgataattcattaccttaggccttgtaatattaaatacttcattttctttaggagaacgttcgactaacatagctaatttatcaataacatcatccatagatactggcgcaatcatattgtaagcccagttcggtagaatcattgctgacaaacgctctatcattcttttaaaaataggatatgaactaccgtttgaatctataattaacccagcacgtaatgtgcttacagggacaccataatatcttaatattttttcacattctaaccgactttttaagtgaagttacaaatgactatcattcgtgataataccactcataaatataatgtgtttgaccccatgttttttcgctacgcgcccaacattatcagctagtagtgcatccatatcttcaaaattagcctgtgtaagtttagcacttgtcttcattgaatgaccaagataaatcgcagtatctatacctttcattacttcagttatagcatctaaatcaaataaatctgctgatttccaagttacatttttttcattttttttattttgagcatttcttgatattgcgataatctcatgattaacttttaatttatcttttaagtgactaccaatatatccagaagcctctgttagtaaaatcttacccatcattttatctctcttcctatattacttacgagaaacattctatcacttattatttgatataacctcatccgtttttatctaaacttgaaactctattcagatatattttcaaattattattatttaatatttatatactttataaaaaaacgctcgtaacccttaattaggttacaagcgttctatctctattgaattaaactaaagtttttacgacttcttgacaacgtggacataaatgatcaagttcaccaacagatcctaatgtttcactataattccaacatctttcacatttttcacctgaagcatgttcaatacgaatgtcaccatgttggtattcatttccattgtctactttttcagtcacttcaacttgagagacgataaataattgttgtaagtcattaaattgttgtaaaaattctgcagctttaaagtgatcattgtttccaatcactactttagcttcaagagatttaccgataactttttcattacgtgctgcttctaatgcacggtttacatcatcacgtaatgacataaattgattccatttatctaataattcttgatcaacgtcaacaacttttggcatatctgctaagtgaacactttcttctttaacatgtggtgtatgagaccatacttcttcggcagtatgtactaaaataggagcaagtaatttagtcatatctactaaaatttggtacaacactgtttgcatactacgacgtttatgtgcgtctttttgttcaatataaagaatatctttaccataatctaaatagaagttacttaattcaacattgataaagttttgaacttcttgataaatatttaagtaatcaaagttatcatagtgattaatagtactagcagtgaattcacgtaagcgattcaataagtaacgatctacttctaataattcatgttcagctacactgtctgtttcaggattaaagtcattaatattacctaacataaatcttaaagtatttctgatttttctataaacatcagacgtttgttttaaaatttcatctgaaatacgtacatctgctaagtagtctgtactacttacccataatcgtgcaatatctgcacctttttgttttactacttgattaggaacgataacgttacctaaagatttactcatttttttaccttcgccatccattacgaaaccatgtgacaataagaatttataaggtgcttgtcctctagtcgcaactgctgtagtaattgaagagttaaaccaaccacgatattggtcactaccttcaaaatataaatcggatgggaaacgcaattctggacgagtttctaacacgcctctatgagatgaaccagagtcaaaccaaacatccataatatctgtttctttagtaaattctccattagggcttccaggatgtgtgaatccttctggtaataaatctttagcttctctttcaaaccaaacatttgaaccatattcttcaaataaatcagctacatgattgactgtttcttttgtcataataatatcgccattttcagcgtaaaatacaggcaatggtacaccccatacacgttgacgagaaattacccattcaccacggtcacgaatcatattataaatacgtgttttaccccaatccactttaaaatcagtctcttcaatcgcatctaagatatcttgtcttactttattaattgaagcaaaccactgaggtgttgcacggaaaataactggttttttagtacgccaatcatgtggataactatgtgtaataaagtctaattttaataaggcgtctttatcagttaaaaggtctgttacagctttatttgctttatcatagaacataccttcaaattgtccgccttcctctgtgaagacacctttatcatccaaaggactgatgacaggtaaatcgtatttttgacctacaatatagtcatcttccccgtgaccaggggcagtgtgtacacaaccagtaccagcatcagttgttacatgaccaccattaatgactaatgacactcgatctaagaaaggatgttgtgcttcaacatactctaattctttccctgtaaattctttttccaattgaatagtatctttatcccagcctaatgcttcagaaacactttcagctaaagcttcagcaatcacgtatttcttaccatttacattatattgaccatatttcaaatctggatgaactgtaattgctacgttagaaggtaatgtccaaggtgtagttgtccagataataaattgagcatcctcatcgatagtaccttttgaatctttaacatcaaaggctacataaatagatgctgaacgtttatcgtgatattcaatttcagcttcagcaagtgaagattcacttgatggtgaccaataaacaggttttttacctttataaattaatcctttatcagccatttcaccgaacaaacgaatttgagctgcttcatattcaggtttaagagtaatataaggattattaaagtccccacgtacacctaaacgtttaaaatcttgtttttgaagttcaacttgttctaaagcaaattctttacatttttctctaaactcagcaattgacatttttttgcgatcaacgccttttttagtcaatgcttgttcaattggtaaaccatgtgtatcccatcctggaacgtaaggtgagtaaaatccttgcatcgttttataacgtacaataatatctttaataattttatttaatgcatgtcccatgtgaagattaccatttgcataaggtgggccatcatgcaaaataaatgattgatttccttcatttttctctaaagctttttgataatgattatttgcttcccattgctcttgaatttttggctctttattaggtaaacctcctcgcattggaaagtcggtttttggcattaataacgtttctttgtaattcatattttccactccttaaatataaaaagaactctaagttcaattaatagggacgggaaatccgcggtaccacccttcttaactcaacttagagttctcttcttaatattataaaattttaatatgtcagtgatataaaaaatagacttatattaggcttgcaccgtctcctaactcgctgtgaaaagtttattattttttacgtgtctgacattttattaactatttatttgatgatgattcgctacttgaaacatccttattttcagatgtagacttacttgtattagttgtttcattagaattgattgactgattttcctcatttgatactgtctcagttgtttcactcgttggagtttcattattcgcatttggatttacatcttgtggatttaaatgctgtatattttcttgtgtcacttgttctgcatcaaaatcataatttaataagtaatcccaatcatcatttttcaataaatccagctgtgcttctacaagcatacgaaatcttgatctaaatattttagattgacgtttcatatcttcagtttggaaagataaatgacgtgctttttcaatagcatcatttacaatcacatcagcttgcgcttttgctttagagataattgcttctgattcttttgtggcagcaatttttgtttgttctccagcttgttgagcttgaataagcgcatcacttactgattgatgaacatcttgataagatttaatattagtatctctctcttcaagcactttttcaagttgttttttttcttctttaagtctttcaatctcattacttaattgagttaaaaagtcgctaacttcagcaggctccaaaccatttttcactcttgtaaattccttatttcttatttcattaggtgtaaaagccatctgttatcctccttaaaacaaaccatcataaaggtgtttttattatttatcaatcaatatcatttacttaaatagtgtttgatacgttatatgaactttttcttttttagttttgccacctatatcaacaattcgagcacgtccaaatccttgaatagagagcaaatcattgttttgaagttgaaaatcgggagaatcgattaaagtatgattcacttttacccgttttttttcaattaattgtttagcgattgatctagattttcgaatcatttcttttaaaacgacatctaatcttaaagcactgactgtactatgatgaatattccaattctcttttgattgtatcatatctttaaatggaatagaatcaagtttaactgtagcacctttaatctttgttaattccatcataatatatgattccaattgctttgtcaaaacaaactgaatcgtatcaccaacaagtatatctcctacttgttctctttctatacctaaagacattaaagttccaagtacatgttgatgttgaatagacacaaatttctcgggataattaatttggattaatacctcttcaaaatcatcttcagtaggttcaaaataactaggcgcaataattgctctctttctttctgccgattgaccaccgaaatagctcactttcatatcttcaaaactaccgacgatgacttctaatatatattgtcctctaggatctaaaaatgaagtcaatacaggtgcatattgttgattaacttgttcacatttatctaataattgatcaataagtggttgttcttcatttctaaaatgctgataaatatcgatgattcacgcctccttttttaagtgttaaaaagcctgagacattatgcatatcacaggctctactaacttattataaaattattttagtattaaataatttaatatcatatcaaaaatacttttcaatccatattgaaataatacaagtacaaataatgctacaattgatgaaatatcaatcataccaatgggtggaataatctttctaaatggctctaagaaaggttcatatatcttacttaaaaatgatccaaatttagattctctaattgttggaacccatgaagtaaagaaataaataatcattccccaataataaatttgaaccagtaataatataaagttaaatatactagctaatataccaacatccatatattatattctactccttaaattattcgtaatgttgttgtgtattcatctgttcaaggtgatcggtaatactacctgccacctcaacattatcaggtgtacaaaggaagatatcagcacctacacgttgtatatctccgccaatggcataaactgttccacttaagaagtcaataatacgtttcgctgatactttatcaatacgttgtaagttaactaatgtcgcacgacgatttttaagttcatctgcaatgtcttgagtatctgaaaatacacgaggttcaaataagcacatttttgaattttcgtaattactataacctgtaccagctgattgattcatagtaacaacattttttgaattagacttatttgatgtatttcccatacgataattcctttcttcagtattgtaattttttgatactttcttttgaggtacagtttttaagtgattttgattattctgtgttctttcaataggttgctgttgcatattacgattttgattttcttcattttgtgttacacgctgttgtctttcagcagggctttcgacttcttcttcatcttccattaggaaaaaattattaaataaatccttgatagccacggggctcactcctcttctccaacaagtttagtccctattcttataaatgtagcaccttcttctacagcaatagtataatcattactcattcccatagataaatattcacatggtgcataattcaatttaaggtttttaatttcatctcgttttaatctcaattgtttaaataactgatgtatgtagtccttatcatcggtataaggcgccattgtcattaatccaacaattttaatattgtcgaatgctttaatttgttcaataaaatcattaacttcactaagcgcaataccatgtttagtttcttcaccagaaacattcacttggataaagcatgaaatagtgtgagttgctcttttattaatttcttttgctaaactcaaacgatctagtgcatgtaaataatcgatgtcattaatcacatcttttacttttctagactgtagtgaaccgataaaatgcattgtaacatctttaggtaaggcttgttttttttctagaaaaccttctaatctattttctccaaagtgtcttaaaccggcatcatacgcttcttttgctcggtctattgtaacatattttgttactgcaatcacgtttggagcggtcttaatcacacttttttcaagatgatgattaatttccgcttgtattttttctaaattttctgttactttcattatatatcaacctcttaactttgtaatgacataaaggattatagtgatataactgtattacactacacttctcccttttgacctataaatgctagcatcctgccagttttacctttttcaacacgataagagaaaaaaagcgataagtcttctgacgtagtatattttgtaatgttaatattttcagctggtacgccactatttattaataataaagcgttggctaattttaaatcaataccatgtcgatcagtatctcgtgtttcaatatatttgtcagaattaataggcaatgtttcaaatttctttttaatatcatcatttatttcataggttgaagaagtcgctggacctatgactacatttaaatcttgatagtcaaattctacatatttaagcatttctactactatttgaccatatgttcctctccaccccgcatgagctagagcgataaaatgatgtttttcactataaaaatatacaggtacacaatcagcataacacatcgttaataatatatctgaatcataagtatacataccatcaattccatataattcattacctaatgtcttaatattagcgccacaatgtgctttagtaatgtgagcgatattattttcgtgtgtttgaataggaaaaacccattgttgtgtaggaaagttgatagcattagctaatatctcttgatgatgcgtcacataactaggttcatcatcaatataacgtgccatattaaatgcatctcttggatatggactctttccatcttcgcgtgtagtaaaaccaagtgttaactgatcatattgtgatgtataactcaaataatgtggctgttttataaatttttccacgttgtgaaaaccaccttcacttttaagaatagtcatacctagactattgttttatattttatcagcatttcgattaaaagatgtagataaatgtattatataacatatttctttttaaattaaacaaaacaaaaagagcagcattctcctcagaaatcactgctcctttctttatatttatactttaatattagcgtctagttcttctagaacgtctttcttctctattacgaataaagctaggaatatcatcatctttagtagtatgacttctttcgcttagaccatcagaaggacgtgaattagatgtactatgtgtgaatgagtcttcttttggtgcactttgagttgatgtactagaagttgcacttgaaccaaaaccagtacttgacgctttacgtccttgagatgttggtttatcttcaaatccagttgcgattactgttacaacaatttcatcttgcaattctggattaattacagtaccaaaaatcatatttacatcttcatctgctgcatcttgtacaatatcagctgcttcttgggcttcgaataaagataaagattctccacctgtaatgttcattaacacaccttgagcaccaacaattgatgtttcaagtaatggagatgaaatagcttttttagcagcttccactgctctattttcgcctgaagatacaccaatacccattaatgcagaaccttggttagacataattgtcttaacgtcagcaaagtctaagttcacttcacctgatacagcgattaaatcagagataccttgaacaccttgacgtaaaacattatctgcttctttaaatgcttccatcataggagttgatttatcaacaatatctaataaacgatcgttaggaataacaattaatgtatcaactgccgctttcattgcttcaacacctgctgctgcttgtgtagaacgtttacgtccttcgaagccaaatggacgagttacaacacctactgttaatgctcccatttctttagcaattttagcaactactggtgcagcacctgtaccagtaccgccacccataccagcagtaacaaataccatatcagcgccttgaatagcatcttcaatttgttcgcgtgattcttcagcagctttttttccaatttctggatttgcacctgcacctaaaccacgtgttaatttttcaccgatttgtatcttagattctgctttagataagtttaaagcttgcccatcagtgttaattgcaataaattcaacattgttcattccatgatcaatcatgcggttaacagcgttgttaccgccgccacctacaccgatgacttttaatgtcgccaaatgattaaatccttgttcaaattctaacatttatttttcctcctagtcttaatggccaattattcaaatagagatttcataagctttttaaatttgctttcttctttatcagatttttcatgttcatcatcataatgatgtgttccatcttgatggttgttttcatcatacgtttcataatcatcatgtttctccgctttttcacgtacttccggctgatgattttcgtcagtgtcttcgtttttattagatttacgtttaaaccagtcaaagccacctgattttgaagtatgattgtgttcgtcattttcaatgacttcttcttcaaattcatcattatcttgataatttattgtaacataatctaataattcatcaaatgtgatactactagatattgtagaaatcgctgaagtaaattcaggttttctaattcccatttgagaaggtgtatggattcttattttttcattaaccattgtacttagtaattctttaacgcccaataagtttgaagaaccacctgtaacaatgaatccaccatttactttagttaatcctaaatctaccaacacatcaaatacttcatcaaagatatcttgcactgttctttcaataactgcacttaaatctttttgagtatactctactaattcgtcactatctacctgatcaacactgaaaacgtcttgatcagacgctgattgtgtataagcatgtccatattgatgtttaattttttcagctgtttcatatgtagtgtttaattcttctgcgatatcatctgtaatatcacgtccagctaattcaattgaatcggcatctacaagttcaccgcgttcataaaaggcgatttgagtgagatcttcaccaatatcaattacacatgcacctaattctttttcagttgcagataaaatagagccatagttataagcatctgaatagacgtccaatacatctactccacaagattctacacatttaatcatattaattagaattgacttgtgaattgcaataacacctgcttctacttttaacgagtgtcttgcaatgagttctttaggatccgaaacctcgttatctccatctacaatgaatctaatcggaaacacatcaataacttctgtatcaggtacatcatttttttgacgtataccttccaatactgtttcaatatgtgatccactaatttctgtatcttcgtaaaaatcaatttcgttttcttcatcatacacttcagtaccgatgataggtaattttaagaaaacttcttttatatccacacctgatgcgatagaagcttttttaattgtatctttaattgcttgtttcgcaatatcaaaatcatcaatcaatccattcttaataccgctagtgtaggtttgccctgtacctatcacattaataccattgtgaaatttttcgcctactattgttttaacacttgatgaaccaatatctatgcttacatagtaatgttcctccatagataggcacctcctgacaaaatactattaaaatacactatatttagtttacaatacgtcgtttagcttgtgaactataaacacatattattatcgaaattttttaattatttgtatccgattgttcgcttattttatttaatgcactttgtaattcattttttgcttctgtttcttgctgtgttttttgacgaacattttgatcggacttagaattaatactgctattttcattatatggaataaatgatgctcctacagataaatcaatatatccttctgtttttaattgacctgaactatcttttgcaagagattgagacatttgaggataatactcgattttgttagctagagtattgatgtctcctactacttgcataccatctttcatatataaaaggactcgattttgttgattctgtaaaggtgcatattttatttctgaaatcatatctctcgtttcattagacattttagataatgctttcgtaatactatttaaattgtcacctttaaaatcttctaacacaggtgcactactcgcaatatcaccattataattgtctaattttttatttccttcaattattggcacatatttatttttatcttttacaatacctactaaattattttcaataattttaacatttaaagtattaggcaactgtttattaatctgaacatctttgattaatgaatttttctttaaattattgatagctttacttttactaaaagtataaatgcgtgatccttttttgatatttaattctttttcaacttgactatcacttacattatgattaccactaatattaacatgagaaattctacttaatggtgtaaacatatatagtagaaataatataattaaaagtattaaagtagtaacaataatatattgaatacgtttttgccgctttcttttgtctatcttttgttgttctcgtttttcagtcaccgttaagtgactatacttatcattttgaaatttatgacgcttttctcttaaacttgtttttacttttttctttaaattttcatctttatttttcgaagaatctaaaggtttatttgacgttctatcatttgaaagattcttttctttttggagactatcttttggtttaacatcgtctttaatttttttatttttatcattttctaattcagttttatctttatcaaatgaacgcttgatagaacgaatctttttatttctattgccccttgtatcatccaattacttcacatcctttaattaagatggtaggtatgcacggaaactttcaataaatctttcgccgcgttcttcaaatgttttatattgatcccaacttgcacatgctggtgaaagtaaaacaacatcattaggttcaatgacatcttgaactttttttactgcatcttctatatcaactgccttgattacttctttaccttgactattacctaatttagcgaatttatcttgagtttcaccgaaaactaccattactctaacatgtttcatgtaaggaattaattcatcaaatccattacctcgatctaaaccaccacataaccagataataggttgtttaaatgaatttaaagcaaactgtgttgctaatgtattggttgctttagagtcattatagtatttatttgttcgattcgttccaatatattgtaatcgatgttcaatacctgagaatgttgttaaactatctacgatagccttaattggtacgcctgcaagtatcgcagctaaaacagcagctaaaatattttctaagttatgttctcctggtaaaactaaatcatcaatattaataaggttaacatcattataaacgatataattatctttaatatagatgccatctacttcttgttgagtagaaaaatataatgttttagcttttaaattttcagtttcaattaaatgacgttgatgataattacaaatcaaataatcatcttctgtttgatttttgtaaatacgtcgcttcgcattttgataattttctaatgactcatgataatctaaatgagcagaatagatatttgtaatgatggcaatgtgaggtttgtaatgttcaatgccaagtaattggaatgaagataattcagtgattagatattcatcaggtgacgtttcttgagctactttagaagcaacatacccaatatttcctgaaagtcttccagttaatctactttttttaaacatatctccaatgagagaagttgttgttgttttaccatttgtaccagtcacagcgataattggagcttcagaaattaaataacttaattctacttcagttaaaattttaaggcctcgttgatatgcttcatcaataattgaaactgtataaggtatacctgggtttttaacaataatcgggttgctatcaagtaatgataatggatgaccaccatcaacaattttcacacctaatgtttctaagtcttttgcatggggatctttagataaatctttcccatcatttacagttacatttgcacctaatttaactaataacttagcagcttcataaccactttttgctaatccaactacaagaacatctttattctctaatcctgtataatttagcattctaatgcactcctatccataatccaattaatcctgaaattaagcccacaagccaaaatactgaaacaactttccattcactccatccgctaagttcaaaatgatgatgaattggtgtcattttaaagattctttttttagttaatttataagatgatacttgcaacattactgataatgtttcgataacaaatactaaacctacaaaaagtaatgaaaattcttggtttaacatgattgaaattgtagcaaaaatacctcctaatgctaagcttcctgtatctcccataaatactttggctggatttaagttatacggtaagaaaccgagtaatgcaaaaatcataataatacaaaaagtaccaattgcaggggcatttaacatgaaactcataattgcatacatagtgaatccaataattgataagccagttgctaatccatccaatccatcagttaaattaactgcgtttgaaaacccaacttgccaaaaaacaataaaaataacgtacgcaaacgacaatggaattccaaaattagtaaatggaatatttatacttgttgaaaattctattaaatgaaaaacatcgcttagaatgaaaaatataattgctattgcaatttgagctaaaaatttctgcttacttgtaagtccttggttattttttttaacaacaataatgtaatcatcaataaagccaatgagtccaaatcctattgtgacaaagagtaatagaataatgggattggaatgatctgtgaaaaatatagcaataatagatgtaataataatactaattaaaaatgttaaaccacccatggttggtgtacccgtttttttcatatgactttgagggccttcttcgcggatactttgcccaaatttcattcttttaagtgtcggtataagtacaggaactaaaataaatgtgataagtaatgcgataatcgcaaatataaaaagcatggtaatctcctttatgtattttaaatttattcgtttttcactttatttcctttataatcttatcaattttcaaactaattttatatatattatgtaagaaaatgagattataaataaggtatacataatatatgacaccttatttattatcatttaaaacgacgtcatttgttcttatgaatcgtttttatcattagacgttgtatcagttgaattatctgaagtgttatttgaatcagagccactcgaatcagttaaggatgtactatcattaggatcatcagtagataattctatttcaattttattattacttttgagtgttgacccactcgctacagattgttttgttacgtatccactgcctttagtcgtaacattgattccagttaattcttggaaggctaggacatcgtctgttgtccaacctttcatattgggcatagtaatatcgccgtctgtcactgctaacactttactattcggtaataattttgtattagctctagtagattgagcttttattgtattaccattaccaataatgacaggttgtaaatcttttcctttaagactatcttgtgccttttgacttggttgccctacaacatttggcactttactatactgtgctgattgagtctcatcttttttagagcctacatttaaatacttaagtgtattttccatgataggtttaaaagctttacttacccctaattcatatgcttcttggtcatttttctgagcaagactcataccggcataaacaataactcttggatgtttttttggcgcatctcccataaagcttacaaagtagggatttgctcctttaacgtatccactaccattttcattaacgacctgagcagtacctgttttcccttcaatatcataaccatcaatacgataattggaagcatgacttttatcactatttactactttatctaattctgtttcaactttatccgcagtttctgaagtaataggttttccagctattttcttttcacctttatagaatgttttctttgaaattggattgtctatactttgaacaaaccaaggttttaacatatttcctttattaaagaaagctgattgtgcttgtatcatttgtacaggtgtcactgtagtcgattgaccgaatgctgatgttttttgttgtaattcatttgaccaagcaatatttccttttaattctccgtcaaacatgccatttgttgatttaccaaaaccaaagcgctcgtaccaagatttcattttgtcagcaccaactaaatcttgaagatgcatcatcaatgtattagatgagtaagtgaaacctaatgacattggaatttctccccaaccggttttattccagtcagaaattcttgaacccataatatcacgatgaccagattcaaatttttctttaggattaaatttaccttcttgaatggcagctgctaatccatatgatttaaatgttgacccaggctcataggcattttgatataaatcattcgcccatttttttccaaagtctttacccgtttcggggttgaacgttggacgttgactatatgcaagaatttctcctgttttcgcatccataaccactgcaaataaatcttttggttcatatcgtttcaccatatcatcaagggcctcttcgacaaatacttgtatatttgaatcaatggttaaatgaacgtcatcaccacgttttggcgctttttcatttttactgtttggtgcaatataaccccaaatgtcatgtatataagatagcgagcctttctgtccatttagataactattaaaaatcttttctacacctaatgcaccatttaattccccggtatcaggatttttttgagccataccaattaaatgagaagcaaaattaccgttaggatagaatcgttcagtttctggatataaggtgatgcctggtaagtccattttatcgagtttaactttatcttgatatgttaaatttgtccctttctgtccaaattcaacttgaaaggctttcttttgattaagacgcttttcaatttcatcaggcttcatatcaataatttttgataattgttttgctgttttctttttatctttaacataccttggtgtatcaccaacttctccagcatttttatcaataatagctactaatttatatcgttgaacatcttcggctaaaattttaccgtttctatcgtaaattttccctctttcaggctgttcttgcgtttttacgagatatttttcattagcgcgcatcactaaattttgtccatctgaatgtccagttatcatgatatatgaatatcttaaaaccaatacaaaaaagagcagtccgaataatccaacaaggaggactgctcctaatttattttttctaattttaatttttcgcttcgccattagtacgcactacctttacattatcgttctttaggctcataccttgttttttagcctgatcgtaaatgcgctcataagaagaatttttcttaatttcagattgaattgcattgttttcattagattgttgttcaatcttttgatctaactcggcaattttatcatttgtatcgtatgcatccatttttaaagatagcatatagattgctagaacagcaattgctgtgacaagcgttatgtataaaaatttctcaaatcgcgtaagttgaacaacaacctttttagttactgttttcgtctcagattgtgtttttggttgttctttcggtatgctagtgtgctgaatgtgttcatatggttcgtaaattttttctacagccatcctcaattactccttattttaatatttcagcaacacgtaattttgcactacgtgctctattattttcgtctaaatcctcatctgtagcagtaattggtttacgatttactcgttttaacttaggtgtataagcttcaggaataattggtaaccctctaggcacgtcaggtcctttttcgtattcttggaaaatttgcttgcatagtctatcttccagagaatggaaagtaatgactgaaatcctaccttttactttaacatgctcaatggcttgttcaattgaatcttcgaacgcagatagttcatcgttcactgctattcttatcgcttgaaaaatgcgtttagcaggatgaccaccttttcttcgagctttagctggaataccttctttaataatatctacaagctctaatgttgtttcaataggttgttgttcacggtgtgcttctattcttctcgctatttgtttagaaaacttttcttctccataacgataaaagattttaaccaatgcttcataagaccaatcattaacaacatcatatgcagttaattcttgcgtttgatccatacgcatatctaactttgcatcatgatgataactaaatcctctttcaggtatatcaagttgtggacttgaaacacctaagtcatagtaaataccatctactttttcaattcctaaatttttcaaaatatcagttaattctctaaagttattatgtacaaacgtgaccttgtgtaagtgatcttttagtacttctttagcattttctaaggcagtagtatcttgatcgattgcaatcaacctaccgtcatcgtttaattgatttaataaatagagtgcatgaccggctccaccaagcgtacaatctacatatatgccatcctctttgatgtctaattcatctattgtttcttttagcataacgcttacatgatgaaacactataaattcctccattaaaaatcaaaatctatcaaatcttcggcaatatcttcaaaactttcttctgattcttcataaaattcattccaagttcctctatcccaaatctctatccgatttgagacacctattaccgtacattcttttgttaaatttgcgtatttcctcaaattttgaggaatgttaatacgcccttgcttatctagctctacttcgatagctccagagaagaacatacgcataaacttacgtgcgtctttttttgtcataggtaaggttttcattttctcttcaatctgttgccattcttcaagcgtgtagccaaacaaacatttatcaaggcctcgtgtgataataaaacgttcatttaagtcatatctaaacttagatggaattatcatacgtcctttagcatctaattgatgctcgtattctcccatgaacattattaccacctcaccttattaataatttaccacatctcaccactatcctccactaattatgtaaaatatcttaaaattctttaatttgacataaaaaggaggctgggacataattcctaacaaaatagccagtaaatgagtttattataaattcatttactggcttctttatttacaatactacgtattgttggctcgctttcttaggggacagcttcagcctgttcattcatttgtctggtgacaatggcaaggaggtcacacctgttcccatgccgaacacagaagttaagctccttagcgccgatggtagttggactgacgttccgctagagtaggacgttgccaggcaaatcattgtatggatgcgatgagctgatattgagaccgtgaggtctctttttttatgtcgaaatttagataaatcttttgaaactaatgaattgaggagtaaatgtattaaactaaaaaatgataaaacttcttcaataatatactgaagaagtttttaatattatttcaaattaataatgaatacaacattttattttcattaatataaatatttgatggatcaaattcatcgacattatgttttaattgttctaaatcttgatgattatttaactgaatgccaataataacagtacccgtattttgagaagctttttttagatattcaaatttagtaatatcatcttgaggacctaaaacatcattaacaaattcttttaaagctcctggacgttgagggaaatttaaaatgaaataatgtttcatttcttcatataaaagtgaacgttcttcaatttctttcatacgattaatatcattatttccaccactgactacgcatactacagtttttcctataatattgtctttataaaattcaagagctgatacacttaatgcacctgctggttctgctactattgcttgtttagagtacatatctaaaattgtagaacatactgcgccttcatcaatttgtaagtagtcgttgacgtattgtttgacaatattaaaggtaatatcaccaacacgtgctactgaagcgccatcaacaaatttatctatatgttctaaagttacaactttattttgaactactactgattcatacatactacttgctccggcaggttcgacgccaatgatttgtgtatgtggactatgttcatgcatatatgtacttacaccggatattagacctccgcctccaatagctgcaaagagataatcaaattgaatcttttctttttttgcttctaataaaatttcttttgctaatgtcccttgaccagcgatagtataaacattgttgaatggatcaataaatgtcatatgatgctcatctgtataaactaaagcttcttttaaacaatcatcaaatgtatcgccagttagaacgatttctacattttctgcaccgaagaatttaacttgatttactttttgaagaggggttgtcactggcataaagataacagcttttaaatttaatgctttagcagtataagctactccttgggcatgattaccagcacttgcgcaagtaataccttttgatttagcttgtgtgtctaatactgaaatagcgttataagcaccacgcaatttaaatgagcgtacccattgcaagtcttctctttttaaataaacattacaattatatttttgtgaaagataatgatcatattgtaatggtgtttctttcacaacatcttttatacgtaaataagcttcgtctacatcagtagctgttaccgttgtctttaaaaccatttgttatcatccttacattgttttctcatatttctctattaattcttcatattttaatgtaatagcaatatcatctaatccatttataagtttatctttccaagtttcatctatatcaaagtggaaagattgatgatttgctgacacagtttgatttggtaaatcaaccgttatattattttgatcggctagatattttctagattgttcatttaaaacaataggtaacattccattttttgtacaattcatatagaagatatcgctaaaaccaccagcaataataatattaaagccaaaatcttttaaagcccaagcagcatgttcacgacttgaaccacaaccaaagttgtctccagtaataagaattgaagcacctttatattttggtttgtttagattaaaatccggattatctgatccatcaggtaaataacgccattcatcaaaagcaaagggtccaaaaccagttttagtaattcgtttaagatgaacttttggaataatttgatctgtatcaatattgtcgttaaacaaagggactactttacctgtgtattgggtgataggttgaatatccattacttatacaaccacctttcttacgtcaacgaatttaccatttattgctgcggctgcagccatagccggagaaacaagatgtgtacgtgcacctttaccttgtcgaccctcaaaatttcgattacttgttgaggcacaatggacaccttctggtacttggtcaggattcattcctaagcacatggaacatccaggttctctccattcaaagcctgcttctttaaatactttgtctaaccctagagattctgcttctttttttactgtacgtgagccaggaacaacaatagcagtaattttaggatgtactttttttccttttacgatatggcttgcttctatcaaatctgataggcgagcattagtacatgaacctaaaaagacataacctaaatcgatatcttctgctttttgaccaggttttagtcccatatagttgtatgcacgttcatcattaatattttgaatttctgggaatggagaactaaaattcacacccatctctggatttgtgccccatgtcacttgaggttctaaattggttacatcaagtgtaatcactttgtcaaaatgagcatcttcatctgaatatagtttctgccattctccaatagattgattaaagttctgtgcatatggtcgacctttgatgtattcaaatgtagtttcatccggttgaataataccgtatttagctccaccttcaattgccatgttacaaattgtcattcgaccctccatggatagtaattgaatggtttctccagtaaactcaagtgcatagcctgttccgaaatctacaccatgttgattgattaaatgtaaaataatatctttagcatacacacctggttgtaatttacctgaaacttcaattttaagatttttaggttttgtttgccataatgtttgagttgcaaaaacatgttctacttcacttgttccaatgccaaaagcaatagcaccaaatgccccgtgagttgctgtatgtgaatcaccacatacgattgtcttacctggttgtgttaatccagtttcaggacctaccatatgaacgataccttgctcatctgaacccatatcaaaaatatgtacaccaaaatctttggcgtttttctgtaaagtcgtaatctgtttattagcaatttcatctctaatattaaatatatcgattgtaggaacattatgatcaagagttgcaaaggttaaatctggacgtctaagttgtcttttttgaagtcttaatccttcaaaagcttgaggagaggtcacttcatgtataagatgtaaatctatgtataagagttgaggttcgccttcgttaccagttaagacatgtttattccaaactttatcaaataatgtttgagccattatttatgtacctccctttattgataacttttttttagtaactcaaagatgtctgaagttttatagtgtcctccaagatcttttgttgttttaccaattttaattaaatgatatacagcatgttctaattcttctgctgcgacactttgatttaaactttctcttaaacacattgctagtgacaataccattccaaatggattagcaagattttgatgagcaatgtcaggcgctgaaccatgaataggttcataaagtctagtaccgtgttcactaaaacttgccgaaggtgataaaccgagtgaaccaggtattactgaagcttcatcacttaaaatatcaccaaagagattttcagtaacaatgacgtcgaattgtgaaggatgagtaattaaatgcatactacacgcatcaacgagtaaatgatttaattcgatgtccggataagacttgcttacttcagtaacagtttttctccaaagtttacttgaagcaaggacattctctttatctacagaagttacttttttactacgagtacgtgctaattcaaatgcaactttagcaatacgttctatttcagctttagtataagtgagagaatctaatgcttcagaatgattcatatgtctaggttcaccaaaataaatgccactcgttaattcacgaactataactaagtctgtatgtttaacacgctcttcttttaaaggtgaaaattgactggtaccttcagtcactttagtaggacgaatattagcaaataagcctaactttttacgtaacgctaataatccttgttctggacgattattaggatctgtccattttggtcctccaactgctcctaataaaatcgcatctgcttcttgacaggcagagagtgtttcattaggaaggggagtgccatgtgtatcaatggcgcctcctccaaaatcataactttttaaattataggtgaaattgtatttcttacttattatttctaataactctaaacttccatttaaaatttcaggtccgatgccatctccgggtaaagcaacaattttatatgtcattatttattacctactttctctaaatcttgggcaatatatttagcatgagcttctacatatgctttacaagaagcttgaagtatatcatgatcgatacctataccattaacatgttgattttcaataacaagctcaacatgaacctcagcttgtgcatctgtaccttcagtaactgaatcaattctataatcgatgagttcactatcctttttaaaaatacgatcaacagcattgtaaattgcaacaattgatcctgtaccaatgcttgaatcttgataaatatgaccttttttatctttaatgacaacaacagcgctttgtagaccatttgaaacatattgtaattgcaaagtttctacttgataaattgcattttgttcatgttcagaaccttgaataatcgcatgaatatctcggtcagatactgattttttcttatctgctactgctttaaattgtttgaataactcgatttgttgtttaggttcaatgtcataacctaacgttttaagtttttcagcaaaagcatgtttaccagaaagtttgcctaaaggtaattcgtttttgcttattccaacaagttgaggcgtcatgatttcgtacgtttcaggatttttaagaacaccatcttgatgaatacctgattcatgactgaaagcattttgaccaacaatggctttatttcttggaactcgaatgcctgcatatctagaaattaaatctgaagtcaatttagtttgctctaattttaatttagtttcaataccataatgatctttgcgaacgtatagtgctaatgcaatttcttctaatgcagtattacctgcacgttcaccaataccatttacagtaccttcaatgcgtttcgcgccattttcaattgcagctaagctatttgctactgccatacccaaatcatcatgacaatgtgcactataaataatttctttttctgatttaacatttgtaataagagatttaaaaatggcaccatattcacttggatagctatatccaacagtatctggaatattgattattgtagctccagcatcaacagctgtttgaacagattttataaggaatgcttgatctgttcttgatgcatcttctggtgagaattgtactacatcgaataatgatttagcataactgacatgttctttaattgattctaagacttcttcttgagtcatttttagcttatgctctaaatgaataggggaagtagcaataaatacatgaacacgtggtttagcagcacattttgttgcttcatatacagcatcaatatcagattttttacatcttgctaatccacacactgcagtggtagttaatgctttagagattgcttctacagatttaaaacttccagtacttgaagcggggaagcctgcttcaataacatcgactccccatttttcaagttgcttagcaatacttaaacgttcatcaaatgaaaaattcacaccaggtgtttgctctccatctcttaacgttgtatcaaatatttgaatatggctttccatttttaacatctccttacattttatttttgaatgcttttagatttaatgaatggcatcatttttcttagttcgcgacccactgcttcaatttcatgaccatgttgttgttcacgtaattcataaaattctttaaatccattttcgttatctttaacaaagcgattagcgaaattaccattttgaatatctttaagtacttctttcatattatctttaacatctggagtaatgacacgtggaccagatacgtagtcaccaaattcagcagtatttgaaattgaataacgtacattttccataccgccttcatacattaaatcaacgatcagtttcatttcatgtagtacttcaaaatatgctaattctttttgatatccagcttccactaatgtctcgaaaccactttgaatcagtttatgaattcccccacaaagtacagcttgttcaccgaataagtcagtttcagtttcttctttaaatgttgtttcaataacaccagcacgtgtagcaccaataccttttgcataacttaaagcaatatcacgtgcatgacctgtagcatcttgttgaacaccaaataatgctggcacagctgaaccttcaacaaatgtacgtcttactagatgaccagggcctttaggtgctactaagaagacatctacatctttaggtggttcgatgacgttaaaatgaatattaaatccatgtgcaaaagctaatgcattactagcttctaaatttggagcaatttcatttttatatacattaccttgaatttcatcaggaagtaataccataataacgtctgcttgtttaactgcttcagccactggataaacatctaatccatcttctttagctttattaaatgaattacctggacgaataccaactcttacgtcgtaaccgttatctttaaggttttgagcatgtgcatggccttgagaaccgtaaccgataatagcgatttttttaccttgtagtgcatctttttctactgattgatcataataaacttttgtcataatactttcctccattagttaaaaaatttcaaaaattgcgaatattaaaaaggtaataattaactttatgatgttagacattaaatatgataattgatgtaaaatgctagcgcatcatctaagaattaatcattcacatcttcaacattaataacactgacttgtttttttaatttagtaattaaaattcgatatacatcttcatcctcaatatgaactttgattgtcatatcagatatgccatcttcactagcaggttttacatataattcattgatattgtactgtaatcttacaaaagcacttgtgattcgatttaacgtactgacttggtcagctacttttaattttaaagttcggttcattctaggccctccatttcatgattagctttaccactaggaatcatagggtttacaggttccgctggagaaattcttacttcaattaaagcaggaccttcataattaaaagcttcatctaattgcgcttttaatttattagggtgatcgattaagaagcttttaacaccgtaagcttcagccattttaataaaatctggttgatcattgaaaacagaatgtgaaaaacgttgattaaagaatttatcttgccattgttttaccattcctaatgtaccgttgttaattaaaacaatttttacatttagatgatattcaggtaataacgccatttcttgattggtcatttggaatccaccatcacctacaaaacaaataactgttttatctggagctgcgagttgtgcaccaattgctgaaggaataccgaatcccattgttcctaatccaccacttgtaacccattgactatgatgtttaaacggataaaattgtgctgaccacatttgatgctgacctacatctgtagtgatgatggcttcaccatttgtgattttaccaatatattcaatcgcttcttgtggacgacaaaatgtatcattagcttctttgtacttaaatggatgttttgatttattatctaaacaatgatctacccattctttgtatgtagcatgactttgatgttcagtaactaatgcttctaatacttttttacaatctgcaacaattccgagtgttgtaggaatcactttattaatttctgattcatcaatatcaatgtgtaccactttagcatttggtgcgaattccttaggattactagccaaacgatcatcaaatcgactacctaaattaatgagtaagtcacattcagtgagtgccatgttacttgcataagagccatgcataccgcccataccaaggaaaaggggattttcatatggaatagcacctagacctaataaagttgtaacaacaggaatttgatggtgagtaacaaattcggttaataaagcatttgattttgagtgattgatacctgctccagctaaaacaacaggttgttttgcatgatttaaatattgagaaagttgttgaatatcttctttatttggattttcagttacttgatatgaaggtaaatgaactttttcttcaagtggagcagaagaagttaaaacacccatatcttttgggaaatcaataactacaggtcctttacgtccagtatttgctaaatagaatgcctcgtgaacaattctagggatatcatttacatgtttaacttggtaattagcttttgtaattggtgtcgtcattgataataaatcagcttcttggaatgcatctttaccaataccaggggttgccacttgtccggtaaatacgactaagggtagagaatcacaataagcatcagtaataccagtgatagcatttgtagctccaggaccacttgttacgacgacgacaccaggtttgcctgaaacacgtgcgtatccttcagcggcatgggtagcaccttgttcatgacgtgcaagaatatgtttaattttttcatcataaaatgtatcgtataatggtaaaactgcgccacctggatatccaaaaatgaaatcaacatcttcgtgtacaagtgcttctactaataagtcagaaccacttcgagttgtaagtgtttcagtttgtttattactttcctttgtttttgacatatttatcgctccttaaatttaaataagattttctgggacttgcataataccacccgtatttgcactggttactaaagcagtgtatcttgcaagataacctgtttttactttagctttaaaaggctcaagttcttctttacgtttatacaattcttcttgaggctgattaacatctaaagttcgatttactaagtcaataataatttcatcaccatctctaatcagaccaataggacctcctgaggctgcttctggtgaaatatgacctacagcgataccacgagtagctccagaaaaacgtccatccgtaattaaagcgacatcttttcctaaacctcttccgacgatagatgatgtaggagctaacatttctggcatacccggacctcctttaggtccttcatatcgaatgaccactacgtgaccttcacgaactgttttattatcaattgcttctacagctgcatcatgtgaatcaaagcaaattgcttttcctttaaatactttaattgaaggatcaacaccaccaactttaattactgcacctttaggagcaatattaccgaataagacggacaatccaccttctttatcatatggagcatctaaagaatgaataacatcgaaatttttaatctctttaccttggttattttctcttaatgttttaccagtaactgtgagtcgatctggatgtagggttccttcttttttcattaattcattaatgattgctggacatccgccagcttcatgaacatcgtgcatagaataagaagaacttggtgcaatcttagataaataaggcgtttttttagcaatttcattaattctttctaagtcatattcaattccagcttcattagcaattgctaatgtatgaagtacagtatttgttgaaccacccattgccatatctaaagcaaatgcatcatcaattgcttcttttgtaacaatatcacgaggtttaatatcattttttatattttctaccaattggaatgctgcttgtctaatcatttcacgacgttgatcgcttactgctaaagctgtaccgttgtagggaagtgctaatcctaagacttccattaaacagttcatagaatttgctgtgaacattcctgcacatgatccacatgttggacaagcattttgttccatatctaaaaattcttctttagtaattgaaccttctttaaaagctccgactgcttcgaacatagatgatagagttaaagcttttccctgagcagataaaccagctttcattggaccacctgaacaaaagatagcagggacatttgttctaacagctgctaataacatgccaggtgtaattttgtcacagttaggaatataaaatacaccatcaaaccaatgagcattgataacagtttcagccgcatctgcaataatttcacgtgacggtaaggaatacctcataccaatatgtcccattgctattccatcatcgacaccaattgtattaaattcaaaaggaattgcacctgcttcacgaatcgcttcttttgcaatatcagctaattctcttaaatgaacatgtccaggaacgatatcgatatatgaattacaaattgctacaaaaggtttattcatgtcagtaggacttttaagtgctcctgtcgcgtgtaataggcttcttgctggtgcttggtgatcacctttttttatcatgtcacttctcatttattcattcccccataaattactaattattaaaataaaaaaacgccccaataaagttgggacgtttttaagtcccattcaatgagaaataggacttaaacatttagtaaattaagctactaaagttccagccctgaagagtataataaaataattaaattttctagtggtgacagtgaatatgtaaatgattgcatggtattatactcctttcttgaatggatgattatttgaatagttagaattgtttaaaaatttgataaatttaatttacactaaacagatattaaagtcaatactctttttagaattttctaacaatttagaagaataatttatgttttattaatgagaaatttttagtaaagtttgttacaattattaagttaaatttagatgaaataatgaagagtaaaataaacatgaggagagagaacaatacatgatacctatcaaaaatttagatgagatggaacattttgctaaaattttaatgaaacatgttggttcaaaagatgtcattttattgaatggagatttaggtgctggtaaaacaacgttgactcaatttataggtaaatatctaggagtaaagcgtaatattaattctcctacgtttaatatcataaaatcatacaaaggtaaggagttaaaacttcatcatatggattgttatcgcttagaagattcagatgaagatttaggatttaatgaatactttgaagatgacgctgttacaataattgaatggagtcaatttatacaggagttccttccagaagagtatttagtgattaatattacgactataaatgaaagtcaacgacaaattaatatagcagcaaaaggctatcattatactaaaataaaggaagagatagacaatgaacttactgttaattgatacttcaaatcaacccatgtcaattgctttgatgaacgatgatgaggttttagcaataaaaacaacaaatagtaaaaaagatcattcgagccaacttatgcctggtattcaatccttatttaatgaatcgaatttaaaaaaacaagaattagatgggattgttgttgcaaaaggacctggctcttatacaggagtgagaataggcgttactgtagcgaaaacattagcctatgctttgaatactaaattatatggtgtctcatcgttaaaagcattagcggctactatagatacgaatgataaaagaattatcgtaccaatatttgatgctcgtcgccaagcggtatatacaggattatatcaatatgaaaataatcaattaaatacaattgaaaaagaccaatatatttctttagaagcgttgcataaaaaactcaatgctttaaatcaaccttatgtgtttgtaggagaggacacggaaaaattatctgaattactacatggagatattgagactaaactgcctaatgcaactgtcatgaaacacttgattcatcaacctgagaacattcatacgtttgtaccaaattatataaaattgtcagaggcggaacgtaattggttaaaccaacagaagaacagttaactattagagcgatgcaagtcgatgatgtaccaagtgttttcgatattgagagagaaagcttcaacgatagttcatggaccattgatgcattttaccatgaattaaatgaaaataacttcgcaaagtactttgttgttatttttcaagaagaaattattggatatttaggattatggatagtaattgatcaagctcaaattacaaccatagcaatcaaagaatcattcagagactatggattaggtcagctattacttaattatgtgatggactatgctaggcatacttgtgatgtgatgagtttagaagtgagaattacgaatgtgatagctcaacatgtatataaaaaattagggtttcaatatggcggtaaaagaaaaaattactatggagaaggcgaggatgcattagtgatgtgggtgaatttaaatgaatagagacatattaatattagcggttgaaacaagttgtgacgaaacaagtgtaagtgttataaaaaatggaaatacgattttatctaatattgtacttagtcaaatagaaagtcataaacgttttgggggagtagtccctgaagttgcaagtagacatcatgtagagggaattacgactacaattgatgaagcgttatcttcagctaatgctactatggaagatatcgatgccgtagctgttacacaagggcctggattaataggggcacttctaataggaattaatgcagcaaaagctttagcatttgcctataataagccaatcattcctgttcatcatattgctggacatatttatgctaatcatcttgaagaaccgttaacctttcctttaatagcattaatcgtttcgggtggacatacagaactcgtttatatgaaatcacatttaaattttgaagtcattggtgaaacacgagatgatgctgtaggagaggcttatgataaggtagcaagaacaattgatttaccatatccaggaggcccagctatagatgcacttgctttggaaggaaaggacacataccattttcctagagtatggcttgaaaaagatagttatgattttagctttagtggattaaaaagtgcagtgattaataagttacacaatcagcgacaaaaaaatgaagacataaataaagaagatgttgctaccagtttccaagatagtgttgtcgatgtattaagtacaaaggctattaatgcttgtaaatcttatcatgttgaacaccttattgtagctggcggagtagctagtaacaaaggattaagagaacgattaaatcatttgtgtatagaaaataacattaaactttcaatacctaattcaaagttatgtacagataatgctgctatgattggggctgctggatattattactataaagctggagtaacttcatctctagatttaaatggaaaaaataatattgatattgaagatgtaacagttgaataataaagtaaaaagtaattgaacttaaaatcaaataagtttcaattacttttttatttaattaggttaatgtattgatatatgatatatgtcaatagagaacgtgtgtacttatcaacaaatagttaatatcttgtggataaaaagggggtaaaggtgtgaatatagtttgaatgttgtgtaaaagttatgtaaattattatcattcacgttgtggataactaggataagttcgtggataactgatatatcagtattttagttgtttataaatttgtgaatgaaataaataaaaaaactagtaaaaatttgatacttttactagtttttcttagatatattaaattttttcttgcaattcttcccattcagccataacattctctaattgtcgttcggtacttaatttctgctcagcaagttcatttgccttaataggatcattaaaaatatcaggctgagtcaattgttgatcaatttgagtaatttgttcttcatatttttcgatttgttcttcacattgctcaatttgacgctcaatttttcgtaattctctcttatattgtttttgagaagcatacgtattagttgttgacgaatcggtgtcttctaaatcaagcgtttcatctttattgtgttccgcttcaaattcctttaacgcagaagcttcttctgttttctcaataaaatattgatagtcacctaaatacagttgaccaccatctttatttaaatcaaatactttatttgctagttgattaataaaatatcgatcatgggaaacaaataaaattgtaccttcaaaatcttttaacgcttgttctaacatttctttagaatctatatcaagatggttagtaggttcatcgagtatcaaaacgttatcacgttgtaacataagtaaagctaattgcaaacgtgctttttcgccccctgataaatcattaataacttttttgacgtcatcttgaacgaataaaaatcgtcctaaaatagcgcggacatctttttcattcatcataggatattgatcccaaacataatctaatattgttttattagatttgaattctgcttgtttttgatcgtaatatcctatgtttaaattagcaccataagtaatttctccacctaatgctttttgacgatttgcaattgttttgataagtgtagtctttccaactccattaggtccaataatagcaatatggtctccttttgtaacttcaatattaataggagcagtgatagaggattgataacctacttctagattacggatatgcatcacatcattgccagtatttctatcaaatccaaactggatattagcacttttagcatccatcattggcttatcgatacgttccattttttctaatgtttttcgacgacttttagccataccgcttgttgaagctcgagtaatatttttttccacgaaagtttcaaggcgtttaatttcttcttgttgtttttcatattcttgcattcttaattcatagtatttatcacgttgagtaataaattgctcataattacctacataacgcttcacatctcctaaagcaacgtcatatatttgagttacaattttatctaagaagtatctgtcatgactaataataatgatggcacctttaaaatattttaaataatcttctaaccacttagttgtttccaagtcaagatggtttgtaggctcatctaatagtaataaatcgggttcacttaaaagcatttgtgctaaagataagcgtgttttttgtccgccactaaaatcattaatgggtttatcaaattcttcttcagtaaagtttaaaccatgcaatactgttttaattttactttcatattgataaccttcaagttgttcaaattgattagataatgattcataacgctccatatgttgtttataatcttctgaatcataactatcaacgtgagcggctaaccaatcagtttcatcattaataagcgtttccatatgcttaatatgttcaaatggttttgacatttcttcaattacagtcagagaagaatcaagtgtcatttgttgagttaaataaccaatgcgtaaattcttgatttttgaaatatggccactatcataatcttcaacacctgcaataatcttcattaacgttgattttccagcgccatttcttcctactacgccaatacgttctccagttttaacttcaaaattaacatgattaaatatatcttcaccatcaaacgattttgaaatatcatttaattgtaaaagtatcattcaagtttcacctttctatctatgtaacaatcacatttatttaactttaaatttgacattattatatcattttacaatataaggtatgcttaggaaactaagatatttatttttgaaataggttacggtataatattgcagtatatccataataggcattatatatatttcactaaaataactaattgcactctagttagtttgaatatatagattaaaaagttcaaacaaaagggggacattgcatatgcctcaaaatcaatcaaaaatacctcgcgctacattaaaacgtttacctttatattatcgatttgttaattcattgaaaatcaaaggtattgatcgtgtgagttctaaaacaattagtgaggctttagatattgaatcagctacgataagaagagatttttcttattttggtgagttaggtaagaaaggatatggctataacgttgagagtcttttagaattctttaaaacggagattagcgatagtaataatattcatattgctattgttggcgtagggaatttaggacgtgcattacttacttacaatttttcaatacatgatgaaatgacaattacagctgcatttgatattgataaagatattgttggtacaaaagttggaaaagtgacagtaaagcatattgatgatatttcatctgaacttcaaaaacaaaatattaatgtagtgattcttactacaccaggaagtgtggcacaatctgtttcagatcgacttattaaggctgatgtaaaaggtatcttaaactttactcctgctagaattgatgtgccaaatgatgttcaagttcatcatatcgatttaggtatcgaattacaatcactattattctttatgaaaaactcttcaaattaatattaaattattttttaaagctaaaatgcatttgcattatagctttttttataaatatattaattcaatggaaaatattgaaataggttagttaatcaattataataccttagtaaatcaatcgggaaagggtgttttatttgatttggatgattattagtggattaatcgttggcctattattaggttttgttatgcaacgtacacgtttttgtcttactggcggatttagagatatgtatgtccaaaaaaataataaaatgttttatgctttgttagtggcaattacagtacaaagtataggcttactagttttaactggttttgatgtattaacagtttcttatcaaacatttccagtaataggtacgattattggttcatttgtgtttggtattggtatagtattagctggcggatgtgcaactggcacatggtatcgagctggggaaggattaattggtagttgggttgctttaattatgtatgctttatcagcaacaattaccaaagctggaattctattacctttaatgaataaaattaataaaccaacgaatgtaaatgctagtatgtcacaaacgacaggcataccaagttggatattagttattatattaacagcagtaacattattcttagttatccgtacattacgtaaaccaaaacccaaaattgctgtgcccaaattaaagcaaagatattcaggaatacgacattatttatttgaaaagcgctatcatccatttgtagctggaattattgtaggattgattgctttattagcatggcctatgagttattctactggacgtgaagatggattaggtatcactactccatcagcacatattgttcaattcttaatgagtggagatttaaaatttatcgattggggcgtttttttagtattaggtatatttattggatcatatattgctgctagaggagcaaaagaatttaaatggcgtttaccagataaaattactattagaaatagtgctattggtggtatatgcatgggatttggtgcttcagttgctggcggttgttccattggtaatggattagtggcgactgcaacactaagttggcaaggttggattgctttagcatcgatgatattaggtacatggtttatgagttactttattttcgtaagaccaatgaaacaaattcaaaaacaaacagctcaatctactcaaatatctaaacaaactcaaacaacttaattattggaggactgaatatgttatacgaattaggaactgttggaatggtatgtccatttccacttattgaagcacaaaagaaaatggaaacattaaaaaatggtgacgaattaaaaatagactttgattgcactcaagcaactgaagccattccaaactgggcagctgaacaagggtatcctgtaacaaactatgaacaacttgatgatgcttcatggacaatcactgttcaaaaagcttaaatttttctttataaatgtaatgtaatatgacaaattgtgtcatttaatcttacgtgtttttgctattcttaaaaactattaatatgatgtttttaaggaagtggtaaaaatgaagatggatgacacaatttttttatttctatgtattttattagtttggttaatgacaccaggattgagtttattttatggaggcttagttcaatctaaaaatgttttaaatacagtgatgcaaagtatggctgctataattattgttacgtttacatgggtggtcattggattttctttgagttttggtcatggaaatgattggataggtaattttgattttattggtttgcaacatgtaggatttaatacgaatgttcaatttagtccacatattccgtttgccttatttatgttatttcagatgatgttttgtactattgcggtttccattttatcaggttcaattgctgagcgaatgagatttattccttttactatttttatatttatatgggtaattatgatttacagtcctgtagctcattgggtatggggcggtggttggattcaacaacttgatgctttagattatgctggaggtaccgtagtacatattacatcgggagtatcaggattagtattagcaataatgataggtcacggaaaaaaagtagagaaactacagccgaataatttacttattacacttataggtggtatttttgtttggataggatggtacggttttaatacaggaagtgcgtttactttaaatgatatagcagtgatatcgtttgtaaatactatcattgctgcgagtggaggagcatttagttggttgattcttgaatacttttctaataaaaagttaagcttacttggtttattatcaggtgtactgtcaggactcgtaaccattacaccagcagctggatttgtaaactacttaagtgcatacattatctctatgattggtggtataacatgttattttgtggtcaattctataaaagaaaaattaagatataatgatacacttgatgcctttggtattcatggtgttggaggtgtgattggtgcaatattgactggtgtatttcaatcacataaagttaataaagatatattagatggattaatctatactggtcatttacatactatatggatacaatgtattgcagttatagtagtagtactttactcgattattataacttttattattggaaagatattatcaatttttatgtcccttgctacgactgttgaagaagataagacaggtttagatcaacttgtgcatggtgaaaaggcatatttttatggagaattaaataaattacataaaaggtattgatatatatttaaaatgttgaagtttcattagtaaaacagtacttgaagataatcacgatatgataaaattaatattatgttgatattaatttagatgattagtctattaaaaaaatatatcagatattgcaaagtttgcgggagtattgtaaatacaatttcccgctttttaaatcatggattgtaaagtcttaagactaattaccgttacgatattaaatgataaaattaatactaatgatttaggaggcctaatatgactgagtggtcaagagaacaacgctatcgtcgtattgaagatgtgaacaaagatgaattagaagcgttaaagcatcgaatagaacaatcaagctatcgtcaacactttcatattcaacctgaaacaggtttattaaacgatcctaatggattaatgttttataacggaacatactatgtatctcaccagtggtttccattgggtgccgtgcatggactgaaatattggtttaattatactagtaaagatttagtgacatttgaaccaaatggtcccatattaaaacctgatacgatttatgatagtcatggggtatacagtggaagtgcttttgaatttgaaggaaacttatattatatgtatacaggtaatcatcgagatgaagaatggaaaagatatgcgagtcaaatgattgcaaaagtaaaacaagatggttcaatcgaaaaattaaataagcctgtgattgctcatcaacctgaaggatatacaagtcattttagagatccaaaagtatttaaacatcatgaagaatattatgcaatattaggtgtccaaacccaacaagaattaggacgtttacttttgtacaaaatgatacatcgacagattgatcaatgggaatatattggagaaattacaaccgaactagaagattttggctatatgtgggaatgtccagactattttagtttaaatggacaagatgtaattatttttagtcctcaaggtattgatgcaaaagatgaaaaatatagaaatatttatcaatctggatatctaatcggtcatttaaatttcgatacattagaattcaaacatgatacatttatggaacttgataatggttttgatttttatgcgccacaaacatttatagatgaatatggtaagcgtattttaattgggtggatgggattaccagatactcaatatcctacagatgaagaaggttgggcacattgtttaacgatacctagagagttaacaatcgaagaaggacggttacgccaacgtcctttgaaagcgttagagacgttacgtcaaaataaagaaacagcattaggttatgctaacaaatataatacaacacttcatccttatgaaggtacgcaatatgagcttattattgatattttagaaaatgaagcaacagaaatatattttgaattaagagcatctaagttaaattcaacattaatttcttataatactagggagcaaaagattacattagatcgatcagaaagtggtgcattacctagtaatgttgaaggtgtgacaagatctacatatttagattcgccattaaagcaattacacatttttgtggatacttcaagtattgaaattttttgtaatgatggagagcgtgtcttgacgtcaagaatttttcctgatgaaaatgctacagcaattcgcacatctacggaaacaggtcaagtttatttaaaatttactaaatatgacttagggagagataaataaatgagaaagttatacgctattggtgaagcattaatcgattttattccaaatagaacaaatattgaacttaaagatgtaacgcaatttagtcgacaagttggcggggcacctgctaatgtggcaagtgtggctaaaaaattaggtagtagtacagaaatggttacacaactaggtaatgacgcttttggagatattattgtagagacgttagaaaaaataggcgttggtacaacatatattaaacgaacaaatacagctaatactgcactcgctttcgttagtttaaaagaaaatggagaacgagatttttctttttatcgtaaaccatcagctgacatgctttatcatgcttcgaatttagatgaaatcaatgtttctaatcaagatgttctacatttttgttctgttgatttaattgaatgtgatatgaaaaatgcacatcttgctatgattgaaaaatttgaagcggctcatgggatgatagtatttgatccaaatgttagattaccactatgggatagcgcagaagcatgtaaagtgactattcaatcatttcttcccaaagcaaatattattaaaatttcagatgaagaaattgaatttgttactggaataagtgatgaacataaagcgattcaatctttatttaaaggaaatgttgaagtagttatctatacacaaggagacaaaggagcaacagcttatttaaaagatgggacaattattcatcatcaagggtataaagttgaagctgttgacactactggtgctggagacgcgtttattggtgcagtcattaatagaattttaaatacagaattaacagacattacttctctatttaaaggaaaaggagaagaaattttaaaatttagtaatttagtagctgcaaaagtaactactaagtatggcgctatcgaaagtattccaagtttagaagaagttattgaagaactttaaaaaagagattaagaaaccccttcagatattaaaatgaaggggttttaatattatatctttttaacattacgtacagaggcatagcaatgctcaccgtttctgaaagttacaattcgttctttagaatcgactgaatcgatattatggcgatttacaacaaaactattgtgacatctgaaaaaacgatcatcgagttgtgctaattctttaagatttccgtagaattcaatctgacggttatcaagatgcgcaattaaacgatgggattttgtagacgattcaaagaacatgacatcatcatattgtacatatattgaattgctaccacgctttaattcaattgtctcaacattactttcttttgaaagtaattttaaacgtgtatgagcagtttcaatacaatctattattcgcgttttaagttgattaggatcatctttaaaaataaaatccattgcagataccttatagacaaatgttaggtaagtgagttcactatgacttgtaacaaagatgatattcccaataggatcatactttcgaatttcacttccaagtttaataccgttaatatcagcttctaattgtatatctaaaaaataacatccaacatcattcatttcttttgactgttcaataatttcataaggatcatctgtcgctaacgctatttccatcggtttttcttcaatcattatatagttattaataattgaaaccatattttcacgttgtttcacatcgtcttcacaaatgaatattttcattttttcacatccttatggcatattatttataatttctactttttgaacgaagtagccattttctatagtagtatcaagtaacacgttttcagtagtatcagtaatgtcttttaaagtcgttagaccaagtcctctgttatctcctttagttgaaaaggaatcttgaaataattcatggattttcggcatatcttctttacatttattcataacaataaacatgactgacgtttcgacattgatgaatgcaattctaattaaggcatcttctaattcttctgaagcctcaatagcgttatcaatgataatcccaatgatacggcttaaatcaactgtattcatctcaatatgatcaattaactctggcacttcaatactaataggtatatttttttcttgagcttgtaaaattttagttgttactaatcctttaatagcacgcacttttaaattatccgtaccattaattttgattgagttcatttgaaggttatctttcataggaacaatattgtcattaaaatatgtctttaaaccatccatatcattttctcttatgtattctgacattgtagtaagaatattgacgtaatcatgtctaaacttacgcatttcattattaatcgattctatttgtagtgtgtattcataatacgtttcaatttcttccatattacgtctatatcgaagttcacgtaatgtatatctagaaataataatgattaaggtgatgaaaaatataattattccaataaaaattagcccataaatttttaaagaagaaatattgactgtctgaactttagaataaagataaagaattataaatgaaagaactaaaactattgatattatgattagatagtttttatttatagataaataagagtgttttaatttttttaataaaaatttcagagaataagcaaaagtaattgaaattagcgcaaaggttaaggtatgtactatatctactaatacaaacgtataaataatcttttgtattagtacttcaactataaaggcaataaagttggtaaagaacattaaaattgaactactcaaaactgtaataatggaataccatttaaccttgtaaaaaagaaaaatgccacaacctattaataaatataaaatagaaatactacctatataaaaatataaaaaagctgaagggattataaccaataaaatgattaaataatcccttaaagtatatttaatatctaaaataatttttgaaattaaaaataataaaaacccttgaaaaagtgttaagaaaaaattagataacaattccataagtcacacactctctaccaaatactatctttttaagtttgttaattcttcaggaacttcaggttcgtcaaagtaaccactacaaacagtttttgaagcaagtgttccgactgtttctaagactaatgagaataatttaatgaataaatctgtaaaaaatgtcataatttatagtcctccttaggaaaaaagaatggtaattgtgttgtactttcgagtataacacctagtaaaattaactgcttatatggctcaggtactataatagatataatgattaaactgaaagttaaaatgattgacagcgattttttcttaaatattaattgttgtggtataggctgctttttagtggcagcgggtgcataaataataatcagtaataatgcaataccactaacactatacatgataatcatattaatatgatagtaaacaatgagccatggtaaaccaacaaataagattaaattttgaatatggcatagcaaagtagactttgcatgcgctccgtgtgcatagtgtcgaattaaaaaataactaatgtgtgtgattaaagtatacaaaaatgtatggaatatgagcgcagcaccatatgtcacaattgttttagcaatattactaacaaccacttgcatgcctaatcgtacttttaagaattggatatgatcaaggttgtttttctcttgtaaataagatgcaaagtgctcaattttatcatcaattgctttcaatattgtgccactctccttgactatattatacaattttgtgcaattagtctgtaaaataatgcttaactgttaaaatttaatacttaactgtaaaagtaattcgataactcatattttaccatataaaaataaacagtttagtagaaaaagatgcaagttaagaaatttttaataacttaaatgaatgttatgttttaatatactcatatcacattaaagtgatataaacttaataatcttagtctttaaattgttagtctttgttttattcgaataaatctttttttgattttgttagtagttacgaaattaaaagttgatttatcgatgagttgtaaggaatgtttgtgtagtttgactatgtatttgtgatgatcgagaccaatgggttattcgataatatcgattttcatagtaaaatatttcatttatttatttcttcgtgtagttccattcattaataagctatcccaacttattgatgagaaatgcataagactcgctgaagtgttaactcagtagaaaataattaacttagctattctgaatagaaggtaattattttcaatatgtaagctatcataacattgttatgcaatgtaatttttcataattaataacatccccaaaagattgaaaaataactgtaaaacattcccttaagtaaaagtcgtgagtctctcccaagctcacgactttttttatttatataaatgaggttttaaatttctaaagattggaatagcatctctttggcgtgatacttcttgaatgttgatatcaactgaaatagtagcttcttctctgtttaactcaacaagaatatctccattaggattgataaccattgaatgtccagcgtattcagtatttccatcatgacctgtaccattacatgcgacgatgaaaatatcattttctatcgctctagcttgaagtaaacttctccaatgattaagtcgagatgttggccattcggcgacataaaatgcgatttgagcaccttctctagcggggtatcttagtaattcaggaaatcttaagtcatagcatataatttgagtggcgagcgcacctgatgataaagcaaatggttctggaactgtttttccatcttctaaaaattctggttcatttagcattggaactaaatgaactttatcatatttgttaatacgacgaccttctttagatacagtaaaagcagtattataaactttattatttcgtttatttgaaacagatcctgcgacgatgtcaacttgatatgtttgagcaagattcgaaataaaaggaaaactacgtgataatgcttgatctgctttttcatttaattcttctaaagcatagccattgttccacatttctggcaacacaacaacttcagtatcagcatctaattgagtattaaaccattctgaaattttttgttcatttttctcaacatttccatattcgacataaaattggaatatttgtattttcactttaaccactcctcaacctgcttaataatttcaatttactaaatttggctatgaaaagcaaaatgaagcacattacaattaaggtaaaatgacttaactgtaatatgcttcattgataaatttaaatttattattttttaataataaatcgttgatcagtagggtgaatttctttttcaccagcttgttcttcaatatcaccaaatggcatttgtgctacaagtttccatgatgctggaatatcaaatgtttgtgttgtaacttgatcaactagtggattatagtgttgtaacgatgcgccgataccttttgaacttagtgcagtccaaattgcgtattgatgcatagcatttgtttgaacagcccagttagcaaaattatcagcatatgatggcatttgttcttgtaatgattttataacatcttcatcttcaaaatataaaatagttccgtaggcatgctcgaaaccattaattctttgattagtaggttcaaagtcgcgatctggtcccattacatctttgagtacagttttagcattttcccagaatttaatatgttgatcattaagtaataaaacgatacgtgttgattgtgaattaaaagctgaaggcatatattttacaatatgttcaatcatttcctctaattcttcatcactaatagaaatagatgttttagttttataaattgtacgtctgttttcaacttcagttaaaaatggttttgtgttttctttatcaaatagtcccatcaaataatctcctttttttaatatatccagtataaaatttatactggaataagtaaattattatataacaaaaaatttcataaatattaatattctttatcaatttgtttatatgcatgcatgatatgtttttattctttatactaaaactgttaaaaataagaggaggtctcagaatgataaaacaaaatgttattcgaacaagtcttatttttgctataagtgcaactatattcagtcactatagttatgctgaaacctcttctaatatagagagtgaagacgtagatcagaaagtaaacctacaaaaaacttctgacactcagcattctaaaattgaactaagtaatgaaaatcaaaacataaaagaatttaatcataccaacgatgaaactagcaacacagaagaatcacaacaagaaagtaacgaaactaacagtaaggaagaatcaacagcagaggaatcacaagaagaaggcaacgagcctaacagcacaaaagaatcaacagcagaggaatcacaagaagaaggcaacgagcctaacagcacaaaagaatcaacagcagaggaatcacaagaagaaggcaacgagcctaacagcacaaaagaatcaacagcagaggaatcacaagaagaaggcaacgagactaacagcacaaaagaatcaacagcagaggaatcaaaagaagaaggcaacgagactaacagcacaaaagaatcaacagcagaggaatcacaagaagaaggcaacgagactaacagcacaaaagaatcaacagcagagaaatcacaagaagaaggcaacgagcctaacagcacagaagaatcaacagcagaagagtcacaaaaagaaagcaacgagcctaacagtacaaaagaatcaacagcagaggaatcacaagaagaaagcgacgaaactaataaccctaaagaaccaaaaacagagaaagcacatgaaacgaacaaggaaactgatagcatagaagaaccaaaaaaagaaaaagttaatgataagaatcaacaaaagagtggaatagaacatatccataaaaataacacgtcatcttctaaagaaaaaaatcataataaatataaaacaacacaaaaaagtaaaaatgatgattcgactatttttaagcaagaagaacatcaaaatgtaaggtctaaatcaatgaagtcgaaacaaaatcaaatcatacaaccatataacgataatacttcatccaatgtttactcaaacactaattatcaaaagggtaagtctcaaaatagtgtttcaaaaacaatgtttaaccaattgttttcacgacaactagttgaaaacaatcataataactttgaaccaacacatttaaagcaaaataatctatattttcaaagtgatagaagaaaagaatccacttatccaaatatatatcaaatagagtcaagattttcagaaaatatcttaaataggtttaatcaatatgcaaaaggtgcttataagtacaacccttatattattaataaggttaatcatttagatgataatggtgaaaaaataacaaataaagattttaatcatttaattaagaaacaaaaatttgataatcaaaatctaaatatattacaagaggattctcaatactttagatttcaatattttaatccacttaatgctaaagaatattataaaaatttagatgagcaagttttatcattaattacaaatgacattggctctatgcctgatttaaaaaagccaaaaacaattcataaagatgaagtggaagaagaacaacacaaaaaagtcattacttcttctcataaaaaaacagaatcaaaatcatatataaaaactttgaatatgatactgattcctactttaattttaatatcttccactgtaatgataatttatgtatatcaaaagttaaaaacgaaaaaaaagtaaaagcatcaaatgtctagagcattcgatgcttttatttattaagataaattatgtgctagttacacaaatgaataataaattgagtttgttgttttaaatgatttaatgaatcgccaaggaaaatttgcattactacaacgaagccattttgaaacatatgaataagtatcggaacagaaattcgttttgttaaagtataagctaatgaaagtatcatccccataccaaaataaataagaataaatttaatatcattatgagctaatgcaaaaagtaaagaacttacgatagaagcaattaagaaggcaatgattctatttcctttaattcgatcatatagttcaccaaagaacacttttctaaatacatattcttctaaaatagggcctacaacagaaattaatataataaaaatagggagttgttttgctacagccattattcgttgagtatttggactttgttgtggttgaccgaaaatccatatgttaatcacacctacaataacttgatataacataactatgaaaaagccaagtacagcccatgggataatataacgttttgattctttatgttcttgctctaagtttgtaggattcttaattttgaaatgaagaaagatgattaaaattgctgcaagtataaataagataacttgagtatacactccagccctagctaaagccatacctgataaacgattaaatataggcgtctgtgctagaactaagggtaaaaattgtgctaaagcgtatataaataatgttagtattgccacccaaattcttgccatttgaaacctccagattaaatatcaataattcttattttatcgtaaaaaaactcagatgtacaaaagtaagagaatgtttttacttgaaatattgaccaaatttgattattataaaaattaggttagcactcattatattaaagtgctaaatagaccctgctaaggaggaacaatcatgcttaaaccattaggaaaccgtgtgattatcgaaagaaaagaacaagaagaaacaactaaaagtggaatcgttttaactgatagcgcaaaagaaaaatctaacgaaggtgttgtagttgcggtaggcagcggacgtcttcttgataatggtgagacagttgctcccgaagtaaaagaaggtgattcagtagtatttcaagaatatgctggatcagagattaaacgtggagaagaaacttatttaattttaaatgtagaagatatattagcaattatagaaaagtaaaaataactatataaaaattgtcaaaaaaatgattaatattaatggaggtcgtatagatggctaaagatcttaaattttcagaagatgctcgacaagcgatgttacgtggtgtggataaactagcaaacgctgttaaagtaacaattggtcctaaaggtcgaaatgttgtattagataaagaatatgttgcacctttaattacaaacgatggtgtaacaattgccaaagaaattgaattagaagatccatatgaaaatatgggtgctaaattagttcaagaagtagcaaataaaacaaatgaaattgctggtgatggtactacaactgctacagtattagcacaagcaatgattcaagaaggtttgaaaaacgtaacaagtggtgcaaatccagttggtttacgtgaaggcattgataaagcagtcagagtagcagttgaagcattacatgatatttctcaaaaagttgaaaataaaaatgaaatcgcacaagtaggtgcaatttctgctgctgatgaagaaattggtaaatatatttctgaagcaatggacaaagtaggtaatgacggtgttattacaattgaagaatctaatggacttgatacggaactagaagttgtagaaggtatgcaatttgatagaggttatcaatctccatatatggtaacagattctgataaaatgattgcggaattagaaagaccatatattttagttacagataagaaaatttcatcattccaagatatactacctttattggaacaagttgttcaatcaagtcgaccaatcttaattgtggcagatgaagtcgaaggtgatgcattaacaaatattgtattaaaccgcatgagaggaacattcactgctgtagctgttaaagcacctggctttggtgatcgtcgtaaagcaatgttagaagatttagcaatattgactggcgcaacagtgattacagatgatttaggattagaattaaaagatgcttctattgatatgttaggtactgcaaataaagtagaagtaacaaaagataatacaactgttgttgatggtgatggagacgataacagtattgatgcacgtgtaagtcaaatcaaagcacaaattgaagaaactgattcagactttgatagagaaaaattacaagaacgtcttgctaaattagctggtggcgtagcagtgataaaagtaggtgctgcttctgaaacagaattaaaagaacgtaaattacgtattgaagatgcgttaaattctacacgcgctgcagttgaagaaggtattgttgcaggtggcggtacagcattagttaatatctataataaagttgaaaaaatagaagcggaaggcgatgttgcgacaggtgttaatattgtacttaaagctttatcagcaccagtacgtcaaattgctgaaaatgctggattagaaggttcagttattgttgaaagacttaaacatgctgatgcaggtgtcggattcaatgctgctacaaacgagtgggtgaatatgcttgaagaaggtattgtagatcctactaaggtaacacgttcagctttacaacacgctgcaagtgttgctgcaatgttcttaactactgaagcggtagttgcaaatatcccagagcctgaaagtaatgataatgctgcaatgggcggtatgccaggtatgatgtaaaaacgcctataaatgttgatatatcaatgttttgtgtttttactggtcataatttagttatagaaatttaggaaatataataaaaagactgataagttcattttgaagtgtgctttgtcaaatagacaagtaaataattaaaagatatggttggttttgttttatacaaaatcagccatttttaatgttagttttttatattaaaaaaatggacatattctttaattatttgtttagcttcactgatatctttaaatataatttaaatattttttacataaaacttgtcgaaattttacatcttttgattttcaacaattttatttaatatacaaattgaaaaaaagaaaaagataataaataaaaatgctaaatttaataatcaaaataataatatagattaatatagtgataaaagaattcttgctttttatatttatgttgttatttaattttctgacggttttgattatagagtgaatctgtactgaaatattgattagttaattcaaaatgatccagttaaaggtgatgtgtgggctaaatagtatgcaaatttattaaatgttaatcctaatatgaatattgaactagcgtcttcatttgaacgtggtgctagtaatgaaaaattcaaaaaacaaggtggaacactgatttatactacatggaaagatggaatgaaccctattaaatactatagtgacttaataggaaatagaaaagtatgagttttatattggagtctatggcaaaaaatgattgtcttagattctttatatatattggattgcttataaaagtttttaaatataaaaattatataatttttatgatatttattttaagtgtttcgaagtataatgatatcaaagatataaataaacattgacttttaaaggagaatcaacaatgaggattaatattttacaacatacccctaatgaaggtcctggagttatcagagattgggctaccgagcatcaccatgaattatatatttatcatccttattttaatggcggtatcattcccaatgttaaagaaacagatttacttattattttaggaggacccatgagtcctaataatgaggataaatggatttttgaagaaagagaattaattcgcaatttaatacagcaaaataagccaatatttggtatatgttttggcgctcaacaaattactaaagcactaggatatactgtaggaaaatctccagtaaaagaagtcggttgggataaagtttatcttgagtcaccgatcattcctaatattccaaaagtattgatggcattacattggcatgaagaaacattttatatacctaaaaatgcacaattattattttcaagtcaatatttaaaaaatcaaggatttattttgaataataatattattggactacaatttcattttgaaccaggtgctcatgatataaaagagattatcatgaatgatgcttcatacgcggttgattccgtattaaatcaaacgtcagaacagattcttaaccaagaagtaccaaaagagaataaagaagtaatgtttaaattattagattttattacaagtcattaaaaaatagcgagagccttcctggttaggtctctcgctattatacttttatgttattttaagtcatcaattgctttagcaatagaatcaaaaacatgtggaatatcgtttttttcaacacaactaaaagcaatacgaatatctgtatcattaagtgcaataataccaattgagtatttatcgattaaatgaacacgaagttcttcagggttaacaccgattactttaagtgccataaaatatccagagttaaaatcatatgcttgccaatgttgtttatatttttcatcataaactacttcttttgttacttcataacgctcttgtagtgtttttacattagcttgtatttctttatcaaattgttcatggttctctagtatatatttaattgcactttgagaaggcattgctccacttgaaatattacttctaattaatcctttaactttagcctctaatacgtctttagctttttgattatttaatccaaatgtaaggaagccaacacgtaaaccccaagcaaaaaattctttagttgcaccgtcaaggcgtatcggtagaatgttttttgaatctaattgagtaattgcagtaaaaatagattgtgtatagacatcttcataaaataaaccatagtatgcatcatctacgactgtaatcaccttagttcctttttctgctaagcgttcaattgctgagacaattgtatgaacttcttcttgagtaggtgtatagcctgttggattattaggataatttaagataataattgctttatcttgtttaaaattatctaaagtagatacaagtgaatttgttgtataatgtccatcttgatcgaaaatagcataagtttcaatatttgccttatgtcttgtattaaaaataagtttatagtttccccagttatgtgttggtaataaaattgtatcttcatcatttacaaataagtcagcaactaaagataaaccatgggttaatgcattcgtcacgatcggacggcttatagatgaagcttttaaactaggattttcttttaacattttttgttgccataaatctcttaaagtttcaattccttgtggcggagcatatgggaaaatctcatcaggcgaaagatgattgtagacatcaaataatgtgtctgcatacatttttcctttatcattagttgccataccaattgttgcattgtattttgttgatttagcttctgcagactgagacagaatacctttgggataaaacatagattgacctaatgtcgataacatgcttaatatttcaggacggtcatcgcctagttgatcgtttaaatgttgtgctaaaggattcattttcataacctcgctttaaattgttattcacattatatattatcttgaattaaacaaaatataaagttttctaataaaaataaagcagagaagtgtttttattagaaaacggaacgtatgttctgtttgtgtgttaaaatatatataggtcatcatgagatatgacactttactttgtggaggtgtagtgtaatgtcgtggttattagaaggtttagtcacacttataacagggagtatgctaattatatttcgagtttggttagaaactaagtggaaaaataaataaggtgaccttacacaaaaaccccttaacttgatgtggcaagttagggggtgtaatgcaatttgtggatataacactatcttaacatagaacatatacaattcaattttaattaaataaatgattaatgcatataaaataaaaaatttgatataattattataatgaggtgactaaaaatgatgaaacacctaacaaaaatttttgtaggtttagctattgttttgtttgtcattggatattatctacaagccactggacatgaaagtcaaggtataaagttattattggctgccattatgtttatgatatgtgcatttattaatcgtagcaatgacagacgtaaaaataaaaagtaacatatgaaaactatgatgcaattaccactgtaatactgtatcatagtttttttgtttaactatgtttatagtgtatatacaacttatgtcttaagaatactgattttatcttatttttattatttcactttacaaatctgtatatactgtatatattatttatatacagttgtaaagggggacataaatgaaagttattctaaaaaacaccagtgaacagcccatttatgaacaaattaaacaacaaattaaagaaaatatattaaaaggttacgttgaagctggaagtcacttaccatctatgagggaactggcgaaagatttgcaagtcagtttaattacaacaaagcgtgcctatgaagatttggaaaaagaagggtttgtcacaacaataagaggtaaaggaacattcgtaaaagaacaagacagttcaattttaaaagaaaaacaattttttgtaattgaacatcttgcacgttccatggtaaaagaagcaaaaacaattggtatgcctctaaaagaattaaatgaagttttagctttaatttacgaggaggaagatgaatgaaagcgattgaagttaaacacgtaagttataacactaaaactttccaaatcaaagatctttcattcagtattcctcaagggtttgttacgggctttattgggagtaatggtgctggcaagacaacaatgattcgattaatgatggatttacttgaacctaatactggagaaattaaaatcttaggacgacaaatgaaagaatcagcaaaatggattaaaaataaaattggttttgtttactcagaaatgtatttcaaccaacaatggaatataaaaaaactagaaaatatgatttctcctttttattctaagtgggatagtcatatattccatcagtatttagagcgattcaatataccaagtcatcttaaaattaagcatttctctagtggaatgaaaatgaagttatctttagccattgctttaagtcatcacgctgagttatttatattagatgaaccaacagcaggtttagatccaattgtaagaaatgaagttctagaaatattgcagcaagaattaatagatgaaaataaaacggtttttatttcgactcatattatttcagacttagaaaaaatagcagattatcttgtatatataaaaacaggcaatcttgtacttgaaggctattgtgatgatataaaagagaaatattttatcgtaaaaggtgataacaaagatttagatgatgaattaaatcaactccttttatataaagaagaaaagcagacaggttatgttggttttacaaaacatggtcaaacatttaaggaactatttggaaaacaagttgagataaaacatccaacgattgaagaattaatgatttaccttgagaaaatgaaagaaactaatgatgttgaaactcaaaatagaaacgggttgatgacatgaagcaactaataataagaaattttaagttaagacgttggacgcttatcatttatttagtgcttattgttattaatcctatttatacactatttttttcaaaaacaagctatggtttcgttgtatatattccacttgccattacattaatgattataagcattttagattcaggacaattatttagagtacatagacggttaggtggaaaagaggcgtatcttttttatgaaagtttaccaataactaagaaagaattgcttaatgcaaattatctgacatgtattatattaacgattttaggaacattgattattggattatataattttcaatcaacaaatattcaggtaaatgagttgcgttattcaacagcactttcatttttaagtgtaaatttatttagcattcctattgcctttagtaaaagtacagaaagaaaaagagaatatatttcttacactgtttatattattttaatggtacttgctataccgatggcaattgcatttatctttttgactattaatttatttatctttcataatgcacttgatccaaatgtatttaataaatatttaagtattggattagttattataagtgtgatttggctagttataaattattttattcaaatagcacgtattaatcgtcgctagaaaaaaggaggacttttatgaaattagaaaatattactaaaacatacggtaatcataatgttttagacaatatagattttgattttggagatagcaaaattgtaggactcattggtaaaaacggtgtaggtaaaactacactgatgaaagtgatgaatggaaatattattaattacaaaggtaaagttaatttaaaagatgatgaaaatattggctatctcattgaacatccaaaactttatgataataaaacggggctttataatttaagactctttgctcaggtgcttggtcaaggatttgataaagcctattcagataaaattatagatgcttttggtatgcgtccttatattaagaaaaaagttaaaaaatattcaatgggtatgaaacaaaaattagcgattgccgtatcattaatgaacaaaccaaaatatcttattttggatgaacctacgaatggtatggatccagatggctcaatcgatgttctagaaacgatacaatctttagtaaatgaattaaatatgaaaattcttatttcaagtcataaattagaagacatcgaattgatttgtgatagagctgtctttttaagagatggacatttcgttcaagatgtcaatatgaaagatggtagtgcagaagaaagtacctctattacgttggacaatgatgattttgatcaagcgctaaattatttacaagaacattttaatgttattcattcttataaacaaaatggagaaattcttattaaagcagaacgagattatcgaacattgcttaaagcgctcgcacatattaatgtgtatcctaaatatattgaaacacgtaaaaattcgcttcgagatacgtactttaatattaatcaaagaggtgaccattagatgaagagtttacaattagttaaatatgatatattaagtttttttaaaagttatttaacatatatcgcgcttatatgtatctggggtatcatcacagcaatgactgtactattagcaaaaaataatgataaagtcgattattcaatgatattaccaatggcaaattggatgtttctattctttggtttactcgttgttattaaaacaattacacgtgactactctcaaggaacgattcaactttatatgaataaagtgaaaaatagagtaggttatgtgatagcgaaaacgatttcgattattattttttcgttcatatttacacttatcacgtatgttacacttttagttattcagacttttacagatggtaaaaatttaaatggagataaattcctaacgaatatttggttctatcttatcttcttactattttttggactattattattcttaattactttaattgtccaaaaaccagcagtcatttttacattaggtatctttttagtgtttatcgtaccatttttacaaccatttttaggtttaatccctgaatggggcgataatattcaaaaatcactcaaatatataccttttagttacttaacagaaaaatcatcatcaggtagtattaaatttacgaattggcaatggttcatttctattgcatctattgttattttatttatcgctgatgtactttatgctgctaaacgagacatttaaattaataactttttaataaaactggcgacgatacgttcaatttttgtcgccagttttatttgcattgaaaggtactttaatattttttgaatataatcatagttatgatatattaaaaaaaataagtatataagtggtggtcctattgcatattcaaaatagatgggttatctcaattttatttattgtcatttctttattagttgtactaggattgacaatttataaaaatgaaaaaacggttgatttaagtgatgtagaaattaatcatttaaagcttaatgaaacgtttgataactcagaatatagtttaaataagcatgtgaaattagataggtatgttttttataatcataataaatataaaaatttaacaataaaagtcaagaaaaaacatcacaaaattaaaggaattatcttagttaaagatacttttgttaacacaaattttgatgttcatataggtgacccaatcgatgctgttatagataatctaggttataactatgacaaagataaggtaggtaaaggttatgatgctttagtgtatcttgataaagatcatcacatgaaattatcaattttatataaagataatattgttaagcgaattgaattctttagtcgttgatagttaataaaaataaatttatattttaagaaagtatgtgaaagagaaatggataaaattacttttttgaatgaactggaaacggagcttgatgatttaccacgtaaagacaaagataaagtaatgaatgaatatgaagatatcttttataatcaagaaacaaaaggcaagacagatgctcaaatattagatgatttgaaaaatccttatactattggaaaagaaataaaagctaaagaagcaatttcacatgctaaagttacacctaactttcgtaatattgtaaaagctattatggcatcattaagtttgggtgttatttcttttttcttaattgttatcccaatgataatattcttaatatttctagcctttgttttcgtcatttcaattgtgcttatttgtttacctatcttattaattattattagtatcctcaaaagcactcctgactcttttagtaattttctttatagtatttcttatgctggaataggtatattagcgttcgttgcaataataaaaattgttcagaatttatataaacttgttttaaaatatttatcatggtatataaaaataattaaaggaagaatccagtgatgaaaaaattaacaataagtggattagttatatttgttgttttttttctagcagccacgttagtatggtttgttcatgataaagatatctataaacgactgaaatataatgaaacgtttcatcaatcatctatctctaaattgaatatagatagttatagttctgatatcactattactcaaggttcttcatttagagtgaaatattatggggacaatagtataaaagtgaacactcaaaaagacagcttaaatgtaaaagaatcacgttcttctaaaagaggatatagctttaatctaaacccttttaaaagaagtaagttcaacatacatataaccattccacctgataaattaaaacaattaaatattgatgctaaattaggaaaattaaatattaataacatagatatcaaaaaagctagaattagaaaagacggagaaaatttaaatatcaaagaagctaaacttgatcgtattgattattatagtgatcatggcacaattaatataaaaaatagtgatataaaaaatagtcaatttaaagtaatacattctaatattgtggttaatcattgtaccttgaaaaatggattgttcattacaaatgaaggaaagcttgactttaaaaacatgccaagtcaaattgatatgaagagctcaagtaaaaaaggtgatataaacattgattataaaaccaagcctaaagacaccttgttaaaactacatccaggaatgggtgacaataacatcaagaatccttattttaaagatagcaaagtaggtaagagttataatattatagagtgttataacgttaaaggtgatataaatattaaatagaatgaaaaagattagataaaacgttgactaattaaattttaaaacgtttatctaatcttttttcattaatgcgtagcaaatgttaaatcagtatctagctttccagtaaattctattaaatcaagttcatgaccctctaaccatgattgaaagtcgatagatagagggggtctattctcacctaatgtcatccaagcttttaaatgcttaggttcatacattgatgtatgaatcgttcctgaccaacttttaaataacttactataaatattatatttaggatcattaaaaagtttaaacgcagtatatttatctatatcttctgacgtttgactaattgtgcgagcaagacgttctttagattctttggtatagttacgattttcatgtgttaatatttcaaagtgattagtacaaactttatcatatctaacatcaaatgagcgtggcgtaatttcaacaattgcatgatttaaatgcttatccattaaaatataactaaatgaacttctatggggtaactcttttagaaattgaattgcttcttttacatctttacaatattctaagacaagtcgtcctaccatataacatacaaatccatttgcaggatgcttacggtgcataaaattatatcccatcacaagacctgcttcattcataccatccatacgaccagttactctagaggttggtcctatttgcgcgagtccaccatcatttggttgataaagaagatatctgccatcatatgtagcaggatgatagtcataattacgaaccatataatctttaccttgaaaaactgtacatccactttcatttaaatcagtaaaacgatagtgaccgaaatttaaaatcatttgtttagtcggtaaatttaatatctcttgcattcctaataattcttcccagatttctggtgcatacgtttggaaaatgctatatgtttcattaacatcaatgtcaaaacgaggtatacgcttcttccattcacgttctctattttctagtaagggcgtctgttttaaccactgagcagttttgatacctaaatcaaaatgtgatccgcgaaaggtcataatatctgacttaacttcttgcatgaaaaatcctcctatcatttgttttattatttatattgaacaataatttatattaaatttaaagtcttataatgtttatttatatatgatagtaattcactgtgtaaataagacaaatgtcattcattataaataaagaaaaaatatttgattttttaaaaatctttaattttaggtttgaaataatatataaaaaggtatgtatttaatcataacgttaactatgttaaaatgatttaatgtaaacgtatttattttaagtacaggggtgaaacataaatgtgggatttcattaaaggtttatttaaattcttattaagctttacagctattacagcactagttgttggtgtagtagtagtagtatttggctttattttcaaaaaagactttgaagatatcgaaagaaaaacaaaagaaatcgtatctgatattgaaagcaataatgcttaatgcaacgatgtaccatataccagtaatttcatttgaagttactggttttttttattactcttaaataaatacaattggctagtataaatgttaataatattgaatataatggaggtattaaaatgacaaccaaaggttatgtggggtcttatacaaaaaaagaaggtaagggtatttatatattcgaacttaatgaagataatggagaaatacaatcagtagatacaggatatgatatcgaagcatcgacttatcttgctcaaactgaacaatttttgtatgcaattactaaagagaatgaagcatgtggtgtggctgcatttaaaaaagacgagaatggacagcttacactcattaataaatgtttagcttcagagaatggaacagggtgttatatttctgtttctagtgatcataacttcttattcgaagcggtttatactgctggaatagcacgtatatatcaacttaatccagagacaggcgaagtggtaaaattaattgaagagttagaacatagttatccaactggaacacatgagcgtcaagattataatcatattcattttattagagaaacccctgaccataaatatgtagctgtgactgatttaggtgcagataaaattgtaacatatacattcggagttgaagggtttaaagaacatgcagtatcaaaattccatgctgaagatggaccgcgtcatattgaattccataataatgggacatacgcgtatgttgttcatgagttatctaatagagtaagcgttgtacaatatcatgatggaaaatttgaagaaattgaacgtcatttaacgattcctgaagatttcactggagaaactaaattagcagctgtgagactatctcatgatcaacaaaatctatatattagtaatcgcggacatgatagtatagcgatatttacagtagttgatgatggaaaaggaattaacccggttgaaatagtaaaaagcgggggagaatttccaagagattttaatattactgagtcagatgaataccttgtatgtgcacatcaagaaggaaattacgcgctaacagtatttagacgtgatacaaatagtggtatgttgattgctactgacaatcagtataccgcacctgaaggtgtatttgttgatttcttgaattcatcgttatagataaaaaataccctataatgtaaacacttgtaaagtgagccattatagggatttttttataagtttttgaaaaatgttctaatatatttgaatttacctttataagggggatagataatactcgaatctagtcgagtagatttaaaaatatatgatttcatatgactaaatgtatcaaatgaatatttgccatgatattcgccaattcctgaagcacctacgccaccaaagggtaaatttgggttagctaaatgcattaaagtgtcattgattgcaccgccaccaaatgacaattcttctagcacacagttcgttgtattttcatcttcactaaataaatataagcttagaggtttagatttactttgaataatatctatcgcttcattaaaatcatcgtagacgatgatgggtaataatggaccaaaaatttcttcttccataattttagattgtggagtaataccgtctaaaattgtaggttcgatatattgttcattttcatcagtatgcccaccaaaaatcacttcattacgatgtattgctaataattcagaaagtcgattgaaatgttttgtattaacaatacgtccaaaatcagggctgttttgaatatttttgccatagaattcttcaatagattgtttaaatgcttgaattaattcatttttaacttttctattcactaaaatataatctggtgctacacaagtttgaccagcattggtgaatttaccgaagctaatgcgatcacttgctactttaatattagcagtttcatctacaatcactggtgatttaccaccaagttcaagtgtgacaggaactaaatttttacttgctgcttcgtaaacaattcgacctacattttcactaccagtaaagaatatataatcaaatggaagattgattaatgtttgagtttcttcaacgccaccttcaacgacagctacaaaatcgcttgtaaatacatcctcaatcacttttcgcactacttgtgcaacatgaggagtaagttcagaaggtttaatgatggcgttattaccagctgctatagcaccaataagaggttcgaataaaagttgtacgggataattaaagggaccgataattaatattgttccatagggctcaggcttaatataactctttgatggaaacataaataggggtgtatctacttgcttagttttagcccagttttttaattctttacgagctgtttttatactttttaaaagtataccaatttcagtagcatacgcttctactgaacctttccctaagtctatttttaacgactctaataattctgtttcatggtctttaatacttttacttaatagttttaattgttgtttacgaaatttgatatctttagtttgatgtgttttaaaaaactgtttactttcttgaaattgtttttctattaaattcaattgtagtacctcctgtacagtcaatcccaataccgttataggtgtgattgactatatgattttagttaaatgtatccaaggttaaaacatttgaatgaatgattaaaataaattaaaaaaaggctgagagttaagtaacctactatctcagccttattatatatgaattaaaatatgaattatttagttaaaatttcagtgatttgaggtacaacttgttttttacgagaaactacacctgataagaaagccataccatcatctaattgaacattgaaggcttgaccaactttatccttttcagccccgacaactaaaattttagaatcactgttaataatatcagtgacaactaatacaaataaatcatatttttcgtttgcacttgtttctaacattgctttttccaattcatctttacgatttaagacttcatcaatatctacagtattgacttgagcaatacgagtaacataatctcccatattaaatgatttagcatccatatttaataactcttcagcagatttatcagttgttgaagcacctgctttcaacatttctaaaccatattcatctaaatcgacattagcaatgtcttttaatgctttagcagcatttacatcttcttcagtacatgttggagatttaaataataaactatctgaaataatagctgaaatcattaatccagcaatttcaggtttaatcttaaagttacgttctttatacattttataaagaattgtagcagtacaacctacaggttctgcacgatagtataaaggacctgctgtttcaaagttcgcaattctatgatgatctacgacattcacaatattcgctttagcaatagtttcagcactttgttggaattcattgtggtcaactaagataacgtcttgaccttctaaatcatcatttaataaagttggtgcatcaactttaaaatgatctaatgcatattttgtttcagcactcacttcacctaagcgataaggagttgcttcagaatttccagtttgttgttcaaaatcagccatgataatagctgaagatattgcatctgtatccggattttgatgtccaaaaatataagtttttgccattgatttattcacccttaatttttaaatttatccttattttagcatgttttaattgataacttctacctttgcacctaatgagtttttaaaatgagctaaagcgaactgatgaccctcttcattaaatgaggcaacaccttgttcagggataataatatgatagcctaaattataagcagaaattgctgtatggagtacacatatatcagtacatacacctacaatttcaacagtatcaatatgtctttctcttaataaactatctaaagcagtaccataaaaagaatcataacgtcgcttatctaaataatgtacagtatcttcatttttatatttatcaaaaaatgattttaccttaccatataattgacgacctgaagtgccttcaatgttatgtggtgggaataatttagtttcaggatgatacgggtcttcttcaaaatgtaaatccatcatgaaaaagatattatcatgttgatgttgatattgattgagtctttctacaataaactgttcaatatcttggcctggtttaccacaagttaatcgaccgtcatcagcgataaaatcataagaataatctacaacaatcaatgctttgttagtcataataaacatccctttcttaataaatgtttgaataccttaaaaaatgtataatattaaattataaatatagtatagctatacaccattatggttacaaatatatttaataacaacataagataggggataaaaaatattgatcaatgcacaggattttggtttaaaaggaaaacataaacgaagagatactaaagctatacaaaaagcacttaatgccgcaagatacggagaacatacagtttatataccatctgggacttattatattagtaaagcattagtgatatatgatcataccactttaatattagaagatgataccatcttgcagcgtcactcgagagatgcattgttaaaaaatggtaaaaaatttggtttctatcatggatatcaaggaaatgggcatattaaaataaaaggtggtatatttgatatgaacggttcaaagtacccctataataataccgcaatgtctataggtcatgctgaagatatcgagttaatagatattacagtacttgatgttgtaggtggacatgcactagatgcttgtggaatcaatggtttatatattaagaactgtaagtttaaaggcttttttgatgtaaatggtgatcgctcattttctgaagcaattcaattagacattcaagtgcctgggtcatttcctaaatttggtacgactgatggcacgattaccaaaaatgttgtcattgaagattgctattttggaaattcaaaccaatataaaatgcaagcttggaatagagcgataggctctcatgccagtcgttataatcgcttttacgaaaatattcatataaggaataatgtgtttaacggaatgaatgaatatgcattaactccgttaaaatcaaagacaatgtttatctcaaataatacctttataaattgtaatggtggtattcgttttcttggagttaaagatggaaaaaatgcggctgatgtttctacaggacaagttcaaaagactcaagctggagataatttgactgtaaccggtaatcatttcgaaggagaaatgaaaagagatgctatacacgtgagaagttataataatgtaaaacatactaatgtttttattgcaggtaattcgtttaatcattcgacacaaagattacatttagaagatatttctaatttgacatttaatcaaagtgataaagttaaagttaaaaaaattaatattgattagtatttaatttaaaaaggtataattatagatgaaaaataaatgatacgcgctttattatgatatataataaagcgttttcttttatgttataatatcattatatattttcaaaaaagtcagatttctatgaggcttgtttgcaatataataggtatcaaatcaactttgttgagatgatgccatatttctaaaaatagaatatattaagttaagtttctaattttaaagggggagaattagatgactaagcaatcaggttttcgaagaaatgcacaatacttaacatttttttctaaaaaagatcatacaaatcaatcttattctatggggcaattattggggctcattttaggaccgttattgtttgttcttatcttatcattctttcatccagtagaacttcctttcaaaggggtatatgttttaggaattacggtgtggatagctatttggtggattacagaagcgataccaattgctgcaacgagttttttaccactcatacttttgcctttaggacatgtactttcgcctgaacaagtctcttctgaatatggtaatgatattatctttttatttttaggtggttttattcttgcaattgctatggaaaggtggaatttacatacacgtgtagctttaactattattagatatattggggcaagcacgagtaaaatattattaggattcatgattgctacaggattcctatcaatgtttgtatcaaatacagcggctgttatgataatgatacctattggtttagcaattattaaagaagcgaatgagttgaaagatgatgacgttaaatcagatagtatttcgaaatttgaaaaatcacttgttttagcaattggttattctgggaccatcggaggattaggtacactgattggaacaccgccactcattatactaaaaggacaatttgaacaacattttggacaagaaattagctttgctaaatggatgattgttggtattcctacagtcattattttaatagcactagcatgggcttatttaagatttatcgcatttagacatgatctgaagtatttaccgggtggtcaaacattgattgaagataaactcaatcgtcttggtaaaatgtcttatgaagaaaaagtagttcaagctatttttattcttgccagcttactatggataacaagagaatttattttaaaaaatttttcaataacatctgaagttgcagacggtacaattgcaatatttatttctattttactttttatatttccggctaaaagtaaagaaaagcataagcgaattattgattgggaagtggcaaaagaattaccatggggtgtacttatattatttggtggaggcttagctttagcaaaaggaatttcagaaagtggtttagcaaaatggctaggtgagcaactgaaaatgttagatggggtgcatccactagtaatcgttattgtcattacaatatttgtgttatttttaacagaagtgacttcgaatacagcaactgctacaatgattttacctattcttgctgcgctatctgtagcagtaggtgtacatccattgttattaatggtacctgcagctatggcagcaaactgtgcttacatgttaccagtaggaacacccccaaatgctattatatttggatcaggtaagttgagtattaaagaaatggctaaagtaggagtttgggttaatttaatttctgcagtgattattatagtagttgtttatttcttaatgccacatattttaggatttgatatttctgacacattaaatttaaaataaaattaaatatcttgaaatcatatattcattatgtatgttttatcttaatactttaaataaatacataaaaagagcctgggacatcatgagttcatgagtggtcctaggcatttttaatatgatgcggttagattttcagaatgagaggataacttcaacacaaatattgtccactctattttattgacgatgaaaagcgccaataatttttactgaaaaatctaatgtttctaatatcgagataactttattcaaattatctgatagaccggtatctgcttgtacaaagaaacgatacatacccagttgagttttcagtggtcttgattcaatccatgataaattaatatcaaataatgcaaatgtagtcagtatacttgccagtaatccagctttgtcatacttaggggtaattaatagcattgtgttattcgttttagactcaaagttattatcattttttatgactaaaaaacgtgtaacattatgcggataatcttgaatattactctctatagcagtatatccgtacatttcaccactacccacaggaacaatggcagctacatctgaggaaattttttctaatccttgaatcgtactgtcaacataatcgtaagaaaattgatgtttttgaatgtattggcttgtttgactgatggctggtgcgatagagtataccttttttatattttctacctttgaatcacttgtcgcatataaaccaaaattaatatctaaatgtatttccccatgtgcaaaaacatgttgttgagccagtgcatctgccacaatgtttatagttccttcaattgaattttctattggtacaattgctacagattgagcgtcactatttactgccttaatgacttcgtataaattagactttggtatgaaattaaagttatcttttgaaaaatattttttagcagctaaatatgaaaatgtaccttcgggacctaaataatataaatgcatgatgaattgtcacctcatgaatcttgtacactagtggaatggacatttcatcggtatcgcttttttataatggaaattaggatctttaataatatttttgtatccatgatgataattagcagttaacgttggcgataacggtggggctaaccatgaccattttccagtaacatcacgatgatgctgttcctctttttcttcaaataattcaaattgtttagcagcagttaagtggtcaacaatagaaacaccctgtgatttaaaagagtgataaactgcataatttaattctactaatgtacgatctttattaaatgaattatttttaagtgtaccaaattcaaatgtttctgcaactttttcaagcaaattatagcggtaagtatcagtaaaattacgaactgcaatttcagtgaccatgtaccaaccattaaaaggagcagttggatatgtaattccacctattttcaaatccatattagaaataataggaacaccataccattttaaatgtaaatctttcagctttggaaattgatcatgttctatatcaacttctttaatcaatgaagctggaaattcatgatattttataggtgaatttggtaattgataaataagaggaagcacgtcaaagtctgaacctttgcctttccatcccaaatgattagctaattgcgttatctcgcgttctgatggatcgcctttatcttcatatcctgcgtaacgtattaattgattgttatatattttaggtgcatcagttgaagaaaatatagtgatatatggtttgattttaccgccatttgttgctttgcttaaatgattatgaagcgcatctaagaaatgttgttctgtatacatatctcgtgcatccacaacgtttaatgattcccaaaataagcggccgacacatcgattggaattacgccatgccattttagcaccataatttagttcttcataagtatgtgtataggtacctgtttgattgatttctttctctatctcagtgatacgtttagaaataatatgatttgagtaatttaattcaccatacatagtttggataaaatttttagcttcttctaatagcatataaacacctcaatagtattataagcgagtaactgatataacacatacaataaatacttatgtcatgaatttgtcgaattaaaaaaattaatttttaaattaaagactattatcgaaaatactcactattattgaattgtgataaaatatacaaaaaggttgttaggagagatgagggtgtatcgttacgaagatgatagtttaatgttacataatgatttatatcaaataaatatggcagaaagttactggaatgatggtattcatgaaagaaatgcagtgtttgatttgtatttcagaaatatgccatttggaagtggatatgctgtttttaatgggttgaaaagaatgattcaatttatagaaaacttccattttagtgattctgatatcgaatatttacaatcaataggatataaaaatgattttttaaaatatcttaaaaatttgaaatttacagggaatattcgcgcgatgcaagaaggggaattgtgttttgggaatgaaccattattacgagtagaagcgccattaattcaagctcaacttattgaaacaattttacttaatattgtaaattttcatacgcttattacaacgaaagctagtagaattcgtcaagttgcaccacaagatacgttaatggaatttggtacacgacgtgcacaagaaattgatgccgcagtttggggagcacgtgcagcatatattggtgggtttgattcaacaagtaatgtccgagcaggtaaattatttggtattccagtttctggaactcatgctcatgcactcgttcaaacatatggtgatgagtataaagcatttaagatttatgcagaacgacataaaaattgtgtgtttttagtagatacgttccacactttaaaatctggggtaccaactgcaattaaagttgcaaaagaattaggagattccattaattttataggtataagattagattctggtgacattgcatatttatcgaaaaaagctcgtcgtatgcttgatgatgcaggctttaaagacgcaaaaatcattgcttcaaatgatttagatgagcaaacaattaccagtttaaaggcacaaggtgcaaaagtagattcttggggtgtagggactaaattgatcacgggttatgatcaaccagccttaggagcagtttataaacttgtcgctgttgaaaataataagggtgaatatgtagatcgtatcaagctatcaaataatgcggaaaaagttactacgcctggtaagaaaaaagtatatcgtattattaatactaaaactggcaaggctgaaggtgactatatcacgcttgaacatgaaaatcctaataaagaaaaaccattaaagatgttccatccagttcatacttataaaatgaaacatgttaagcattttgaagcggttgatttacatcattcaattttcgaaaatggtaagttagtttatgacttaccaagtgaaaaagaaactcaagattatttaaaacaatcattatcacaattgtgggaagaaaataaacgttatttaaatccacaagaatatccagtagatttaagcacaagttgttggaataataaacaaaagcgcattcttgaagtgacagaacatgttaaggaaatggaggaagacaatgactaatttacaagatatcgtagtaaaagaaatgaaagtaaagaaacatattgatagtcaacaagaaattcgtgagattatccaattcattaaaaattatgttcaatcacatacatttattaagtcattagtacttggcatatctggtggtcaagattctacactcactggtaaattagcgcaattagcagttgaagaactccgtaaagaaggaagagaatgccaatttatagcagttaaacttccctatggtaaacaaaaggatgctgatgaagtagaagatgcacttcgttttattcaacctgatgaagtgattacagttaatattaaaccagcagtagatcaaagtgtagcatcattgaaagaagcgggtattgaacttacagatttccaaagaggaaatgaaaaagcaagagagcgcatgaaagtacaattttctattgcttcaaatcgtagtggtattgttttaggaacggaccattcagctgaaaatatcacaggtttttatactaaatatggtgatggtgctgctgacattgcacctatctttggactagataaacgccaaggtagacagcttttagaatatttagaagcgccaacacatttatatgaaaaagtgcctactgctgatttagaagatgataaacctcaattacctgatgaggaagcattaggggtaacttataatcaaattgatgactacttagagggcaaagaagtaccaagtgatgcaaaaacaacgatagagaatcattatgttaaaaatgcacataaaagagaattggcatatactcgctatacttggcctaaacattcacatgcaaaagaataaatgaatacgttaataattaaatgatttaattactattagtttttagtgacaaaattatttgtgactgataaaattatttcgaattttagttaaatgaaatgaggaataatatgtcagtaataacgtcaaatccatggataatggtattagcgatattcatcattaacgttttttatgttacatttcttacaatgcgcacaattttaacgttaaaaggatatcgttatatggcagcagtagtaagttttcttgaagttttaatatatgttgttggattagggctagtgatgtctagtttagatcaaattcaaaatattattgcatatgcctttggattctcaataggtatcattgttggaatgaaaattgaagaaaagcttgcgttaggctatacagttgtaaacgtaacatcttcagaatatgagctcgatttacctaaagagttacgaaatttaggttatggtgttactcactatgaagcacatggtagagatggaagtcgaatggtaatgcaaattttaacacctagacgttatgaacgaaaattaatggaaactgttcgtagtttagatgaaaaagcatttatcattgcgtatgaacctagagccattcacggtggattctggactaaaggtgttcgaactaagaaagtaaaagcatatgaagtagaagaaatagaaagtgttgtggaacatagtgaagttcaaggtaaatgaaaatgaaactatttcagattgtattgcacgtatgagaaaagaaggatacatgccagtcagacgtattgaaaaacctgtgtactttgaagataaacaaggaaatataaagatattacgacaagatattcaatttgttggtaagaaaatcgaaaacgacatttaataactgctcatatataggtctttgacactttagaagtcagagaccttttaatatttttataaagttcgtaaacctatattcaattagaataaaaaatctttatacttttagtatagaatctgttaaactataaatatagagttaaatacgaactattttacttaaaatcgatttaatgtacagctttttataaaaataattacataagataggagtttaataatgattgaacgttattcaagagaagaaatgtctagtatttggacagaccaaaatagatatgaagcatggttagaagttgagattcttgcttgtgaagcctggagcgaattagggtatattcctaaggacgacgtaaaaaaaattcgtgaaaatgctaaagttgatgtcaatcgtgcaaaagaaattgaacaagaaacacgtcatgatgtagtagcatttacaagacaagtatctgaaacacttggagaagaacgtaaatgggttcattatggattaacttctacagatgttgtagatactgcattaagttatgtaattaaacaagctaatgaaattattgaaaaagatattgaacgctttattaaagtacttgaagaaaaagctaaaaaatacaaatatacattaatgatgggtcgtacacacggtgttcatgctgagccaactacttttggcgtaaaaatggcattatggtatacagaaatgaaacgtaatttaaaacgttttaaagaggtacgtaaagaaattgaagttgggaaaatgagtggtgcagtaggaacatttgccaatatccctcctgaaattgaaagttacgtttgtaaacatctcggaattgacacagcccctgtatcaactcaaacacttcaacgtgatcgtcatgcttattacattgcaactttagcgttaattgcgacatcattagaaaaatttgctgtagaagttcgtaatttacaaaaaactgaaacgagagaagttgaagaagcatttgcaaaaggtcaaaaaggatcatcagcaatgccgcataaacgtaatccaatcggttcagaaaatattacaggtatttcaagagtgattcgtggttatattacgactgcttatgaaaatgtcccattatggcatgaacgagacatttctcattcttctgcagagcgaattatgttaccagatgtaacaattgcattagattatgctttaaatagatttactaatattatcgaccgtttaacagtatttgaagataatatgagaaataatatcaataaaacatttggtcttattttctcacaacgcgttttacttgcattgattaataaaggtatggttcgtgaagaagcatacgataaagtacaacctaaagcaatgaaatcttgggaaactaaaacacctttccgtgaacttatagaacaagattcaaccattacaaatgttttatctaaagaagaattagacgagtgttttgatccaaaacatcatttgaaccaagttgataccatttttaaacgtgctaatttagaatagtttactaatatagttttagtattttcaattgaaataactacactttaattaattaatgcgttaaaatatagttatatttaatttgaaaataggggttgcttgagatgcaaattgaaaaattaagaggagaagcattggatgaattatttgatgctatcttaacacttaaagatagagaagaatgttatcaattctttgatgatttatgtacagtcaatgaaattcaatctttatctcaaagacttcaagttgctaaaatgataaagcaaggttttacttatgcaactatagaaaagaaatctggtgcatcaacagctacgatatctagagttaaacgctcactgcaatggggtaatgatgcgtatacaatgattttagatagattaaatgttgaaacaaaagaataaataaagagagacaattgcttagctaaaaatagcaattgtctcttttttgtgaatataatttttacaatttatactagtataaacttagtgtattgatttagaattgcaaaggtaaaaatgctataatttagtgtatgttaaaagaaggagttatggataatgtatgacattagaaagtggcagcatgtatttaaacttgatcctgccaaagagattagcgacgaaaatttagaagccttatgtatgtcagatactgatgccatcatgattggtgggacagacgatgtaactgaagataatgtcattcatcttatgagtagagttagaagatatccattacctttagtactagaggtttcaaatttagatagcgtaatgcctggctttgacttttattttataccttcaatattaaatagtaatgatgtgacgtatcataatggtttgcttcataaagcattaaaacaatatggtcatatgattaattttgaagaagtgatgcttgaagggtatgtcgttcttaatccagatagtaaagtagccaaacttacgcaatcaaatactcagttagatgttgaagatattgaagcttatgctcaactcgttgaagaaatgtataagttgccaattttgtatttagaatatagtggtacatatggagataaagatattgtaaaagccgcttcccaaatgttaacccatacacaattattttatggtggcggtattagttctttaactgaagctaaagaaatgaaaaactatgccgatacaattattgtaggtaatattatatactcagatattaaaaaagctttaaaaactgtaaaaataaagaaggagtcgaaataatgaatgctctagtaagtaatatgaataaagaacaaagtgaagcagttagaacgacagaaggtcctctgcttatcatggctggcgcaggttcaggtaaaacaagggtgttaacacatcgcatagcctacttattagatgaaaaagatgtgtctccgtataacattttagctattacctttactaataaagctgcaaaagaaatgaaagagcgtgtggaacacttggttggtgaagaagctcaagtgatttggatgtcaacattccattcaatgtgtgtaaagattctaagaagagatgcagatcgtattggcattgaacgcaactttaccattattgacccaactgatcaaaaatctgtaattaaagatgtacttaaaaatgaaaatattgatagtaaacgttttgaaccgagaatgtttattggtgccatcagtaatttaaaaaatgaattgaaaacgcccgaagaggcgatgaaagaagcaaatgattttcattcacaaatggttgcaacagtatatagtggataccaacgtcaactgtctagaaatgaagcattggattttgatgatttaatcatgaaaacgattcgtttatttgaacgtgtaccagatgcattagaatactatcaaaataaatttcaatacatccatgtagatgagtatcaagatacaaataaagcacaatatacacttgttaaattacttgcaagtaaatttaaaaatttatgtgttgtaggtgattctgatcaatcaatatatggatggcgtggtgcagatattcaaaatatattatctttcgaggaagactatcctgaagcaaagaccattttcctagaacaaaattatcgatcaacaaaaaccattttaacagctgcaaatgaagtgattaaacataatactgaacggaagcctaaagggttatggaccgcaaataatggtggagaaaagattaaatattatgaagcgatgactgaacgtgacgaagcagaatatgtagttcgtgaaattattaaacatcgtaagtctggaaaagactataatgatatggcaattttgtatcgaacaaatgcacaatcacgtgtgttagaagaaacatttatgaaatcaaatattccttatacgatggttggaggccaaaagttctatgatcgtaaagaaatcaaagatctattaagttatttaagaatagtagcaaatagtaatgatgatattagtcttcaaagaattattaatgttcctaaaagagggataggaccatcatcagttgataaaattcaacgatatgcactagataacaatattagtatgtttgatgcattaggagaagtggattttatagggctctctaaaaaagtgactcaagaatgtatacaattttatgaaatggttcaaaacttaattaaagaacaagaatttttagaaattagtgagattgttgaggaaatacttgaaaaatcaggatatcgtcaaatgttagaacatgaacaaacaattgaatcacgtagtcgtcttgaaaatattgatgaatttatgtctgtacctaaagactatgaaaaagatacacctttagaagaacaatcattgattaactttttaactgatttatcacttgtcgcagatattgatgaagcacaaattgatagtggtgtaacgttaatgaccatgcattctgcaaagggattagagttcccaattgtattcttaatgggtatggaagaatcacttttccctcatattagagcaattaaaagtgatgacgaacatgagatggaagaagaaagacgaatttgttatgtagccatcacacgtgcagaagaagtgttatatattacacatgcaacttctcgtatgttatttggacgttcacaagcaaatctaccatcacgcttcttaaaagaaatacctgaagaattattagaaacaccagcaaaatcaaaacgacaaacaatcacttctaagtcaacgacaccgtcaaaacgtggttttagtaaacgtacgacttctactaaaaaacaagtatctgcttcagattggaaggtaggagataaagtgacacataaatcatggggcgaaggtatggtgagtaatgtaagtgaaaaaaatggctctgttgaattagatattatatttaaatctgaaggtcctaagcgtttattagctcaatttgcgcctatcgaaaaaaaggaggattagtaaatggataacattcaaaatcgtgtcaatgaactgcatgatttattaaatcaatatagttacgaatattatgtaaaagataatccttctgtacctgatagtgaatatgacaaattattacgtgaattaattgacattgaaaatgcacatcctgaactaaaaactgacgattctccaacagttagggttggtggagaagctcaatcatcatttgaaaaagtaaatcacgaaacacctatgcttagtttaggtaatgcttttaatgaagaagaattaagacgttttgatgaacgtattcgagaacatattggtaaagtggaatatatgtgtgagctaaaaattgatggtttagcagtctctttaaagtatgaagatggacgatttgtgcagggattaacgcgaggagatggtaccacaggagaagatattacagaaaatctacgtactattcatgcgattcctcttaaaattaaagaacctttaaatgtcgaagttcgtggagaagcatatatgccacgtcgttcctttatgagattgaatgatgagagagaaaaaaatgaagaacaaccatttgctaatccacgtaatgcagcagcaggttctttaagacaattaaatcctaaattagctgctaaacgtaaactaagtgtctttttatatagtgtaaatgattttacagattttaacgctactactcaaagtgatgcattagatgaattagatcgtttaggttttaaaactaatcatgaacgtgcacgcgtagaagatatagagggtgtactagaatatattaaaaagtggactaaacaacgtgaacagttatcttatgatattgatggaattgttattaaagtgaatgatcttgatcaacaagacgaaatgggatttactcaaaaatctccacgttgggcaatagcttataagtttccagccgaagaagttgtcacagaacttaaagatattgaattaagtataggacgtactggcgtcgttacaccgacagccattttagaacctattcgtgttgcgggtactacagtttcaagagcatcgcttcataatgaagatttaattaaagaacgtgatattagaatcggtgatagcgttatagtgaaaaaagctggagatattattcctgaagtcgtaagaagtattattgaccgtcgtccaaatgatgcaaaaccataccgtatgccaacgcattgtccaagttgtggtcatgaattagtgcgtattgaaggagaggttgcgcttagatgtatcaatccaaaatgccaagctcaacttgtggaaggattgattcattttgtttctcgacaagcgatgaatatagacggactaggaaataaaattattcagcaactgtatcatcatcaacttattaaagatgtaggtgacattttctatttaactaaagaagatttattgcctttagaacgaatgggtacaaaaaaagtagaaaacttattaagcgctattgaacatgcaaaacaaaattctttagaacatttattatttggtttaggtatacgacatcttggcgccaaagcaagtcaaattttagcagagaaatttgaaaccatggatcgtttacttaaagtaacagaaaaagaactgatagcgattcatgatattggagataaattagcacaatctgtagtaacgtatctagataatgaggatattaaagcacttattgaaaaattaaaagataaaaatgtcaacatgacatataaaggtgttaaatcctctgaaattgaaggacatccagaatttcaaaataagactattgttcttactggaaaattacaacaaatgacacgtaaagaagcaacaacatggttagaaatgcaaggtgctaaagtaacaagtagtgtaactaaaagtacagatttagtaatagctggtgaagatgctggctcaaaattgtctaaagctgaacaatttggtacagaaatatggtccgaatcacaatttattgaaaaacaaaatgaaatatcagaatagaggagaacgtaatgaagcggttattattattagttataacgtcgcttatgatattgacagcgtgtggcaatgggaatgataaaaatagtcagtcaaataataagcaacaagaacaaaattcaaataatgtaaaaacagttgccactgatcaagaagttcaaggagataattatcgtacaatcttaccatttaaagaaagccaagctcgtggagtattacaagataatatggctaatagctataacggtgaagatttcgaaaatggtttattacatctaagtaagtctgtatttccaactgataattttttatatcaagatgggcagtatttagacaaaaatacagttaacgcatatttaaatcccaagtattctaaagacgaaattgataatatgagtgaaagtgaaaaggaatcaaaaaaagctactgaaaatttaggtcttaatccatcacatgatggagaaactaaaccagaaaaaatagcagaaagttctcctgcttatttatctaatatcttagaacaagatttttatgatacaaatgatacaaaaggaaaaacaattaaaggcataacaattggtcttgctatgaatagtgtctattattatcaaaaagaaaaagatggagaaacatatagcaaatcgctagataataaagaaattgaaaaacaaggtaaagcaatggctcaagagttacttacacgccttagagcaaataaagatttgaaaaatattccaattcactttgcaatatatgttcaatcgagtcaagatgcaattacgccaggacactttattgctaatactactgttgatgacaaacaaactaaaattaataaatggaataaaattgatgagatttcagcacttttaccttcaacagaagcagaaaaatatgacaaaaatctaaataataattttaagcaatttaatgatgatcttcaatcttatttctctaattttactcaagcaattggaaaagtgaaatttgtagataagaaacctaataaactagtgattgatttgccaatcgattactatggtcaagctgaaacaataggaattacacaatatgtaacagaacaagctaagaaatattttgataatatagatagttacgaaattcgtataaaagatggtaacaattcaagagcacttattagtaaaacaaaagatgacaaagacccacaagtccatatttatagtaattaatcaaaaagaggttgtgacacgtcgtgtcacagcctctttttgatattcaataaattaatttatttttcgcgaacaatggttttaacttgatttaactgttgttcaatagaatagtttgatttataggtgaagatgctaacaaggtatgtaacgattacactactaataaaaccaggtataatttcatacataccaaatagttcattaatattagcaagtggtttaacccagacaatccaaataatgactacgagagctccagcaatcataccacttatcgcacccgcacgtgttagttttttccaatataaagaaaaaagaacaagtggactaaacgctgcaccaaaaccagcccaagcatttccgactaggtttaatatagtgtcattaggagaccaagcaatagcaagagctacaatggccacagctaacacagataatctgcctacaagtacaaattctttttgatgtgactgagcatgttcttcaccgcgaatgagcttatagaaatcttctgtaagtgagcttgaagtcactaataattgtgaagaaattgtactcataatagcagctagaatggcagcaagtaagaatccacctactaaaggatggaaaagaacttggctcattataataaataatgtttctggatcgtccattttaatatgatttttcgaaataaaagcaattccagttaaccctacacccacagctccaagtaaacctacaatcatccaacttattcctaagcgtcgtgctttaggtaaaagtttgtgagatttaatagacataaatcgtacaataatatgaggctgaccaaaataacctaatccccatgtaaataatgaaatcatacctaaaaaagtagtgcctctaaataaatccatattagttggtttcatttcagctacttgatggaatgtatcccatccactaagttgcatcaaagcaactattggtaccattaccattgcgataagcataataaccccttggaaaaagtcagtaatagaaacagctaaatatcctccgaaaaaggtatataaaatgacgataattgcgactgaaataagtcccaaatgataatttaatccaaatgcgctttcgaataatttacctccagaaacgaagccagagtgcgtatataaagtgaaaaaaataacaataataagaccagaaataattttaatgatattatgtttatcattaagacgatttttgaaaaaatcagggagcgtaattgcatctccagcaacttctgtatatactctaagccttggtgcaacaactagatagttaacataggcaccaatagttaaaccaatcgtaatccatattgccgataaacctgtgctataaactgaccctggaagtcccataatcatccaaccactcatatctgaagcaccggctgataaagcagtaatatatgggcctatatttctcccacctaacatatactcacttaaattgccggttgcctgtttataaccatagtaaccaatcactagcagaataataaaatagattgcaatcataatataagtctgccagcttgtgttagcatgagtacctaaatttgcacctaatacaaacattgtaattaccccctttaaaacttttaaatttatgtttttcaacaacattgtactgaaaaaagaagtgacgatttttaaattagttacatgtaatattatacaatgatatttatagattagagaagtaaaattttatctataaataacagtctatttcaatgtaatgataagtgttaacgagaattagagtatagataaaaaataattcattttattatataacgttaatattaataaattattaatagaaattaatttatatttatagataactatataaatgagttacataagaaagttattttaatacttaactttgctaagaatagttaatacactgagtataataaatatttagatttttaactgaaaatttgatacaattttatgatgaatgagtaataaggaggcttttttaataatgactaaagttacacgcgaagaagttgaacatatagcacatttagcaagacttcaaatttctcctgaagaaactgaagaaatggctaatacacttgaaagtatcttagattttgcaaagcaaaatgattcagcagatactgaaggtgtggaaccaacatatcatgtcttagatttacaaaatgtgttacgtgatgataaagcaatcgagggtattcctcaagaacttgcattaaaaaatgcgaaagaaacagaagacggtcaatttaaagtaccagctatcatgaatgaggaggacgcttaagatgagtattcgttatgaatctgttgaaacactttcagaaatgattaagagtaaaaaaattaaaccttctgaagtagttaaagatatttatgatgctattgaagaaacagatccaacaattaaatcatttttagctttggataaaaaaaatgcaattaaaaaagctaaagaattagatgagttacaagctaaagatcaatttgaaggtaaattatttggaatcccaatgggaattaaagataatattatcactaaagatgtcgaaacaacttgtgcaagtaaaatgttagaaggttttgtaccgatttatgaatcaacagtgatgaataaattacatcaagaaaatgcagtgttaatcggcaaattaaatatggatgaatttgcaatgggtggttctacagaaacatcttatttcaaaaaaactgtcaatccatttgatcatcaagcagttccaggaggatcttctggaggttcagctgcagcagtagcagcaggactagtaccatttagtttagggtctgatactggtggatcaatcagacaaccagctgcatattgtggtgtagtaggtatgaaacctacatatggccgtgtatcacgttttggtttagttgcttttgcatcttcattagatcaaattgggccaatcactcgtaatgttaaagataatgcgatggtattagaagcaattgcaggtgcagacaaaaatgactctacaagtgcaccggttgaagacgttgattttacttctgaaattggtaaagatatcaaaggtcttaaaattgcacttcctaaagaatacttaggagaaggtgttagtgaggaagtaaaaacctctgtaaaacaagcagtagaaacattaaagtcacttggtgcagaagttgatgaagtatcattaccaaacactaaatatggtattccttcttattatgtaattgcatcatctgaagcatctgcaaacttagcacgtttcgatggtattcgttatggctaccattcaaaagaagcgcaaacattagaagaattatacaaaatgtctcgttctgaaggctttggagacgaagttaaacgtcgtatcttcttaggtacattcgcattaagttctggttattatgatgcattttataataaatctcaaaaagttagaacattaattaaaaatgacttcgataaagtattcgaaaattatgatgttgttgtaggacctacagctccaacaacagcgtttaatttaggcgaagaaattgatgatcctttaacaatgtatgcaaatgacttattaactacgcctgttaacttagctggtttacctggcatttctgtgccatgtggccaatcaaacggacgtccaatcggtttacaatttattggtaaaccatttgatgagaaaacattatatcgtgtggcatatcaatatgaaacacaatttaacttacacgacgcatacgaaaaattataaggagtggaaataatgcattttgaaacagttatcggacttgaagttcacgttgaattaaaaacagactcaaaaatgttctctccatcaccagcgcattttggggctgaacctaactcaaacactaatgttattgatttagcttatccgggtgtcttacctgttgtaaatagaagagcagtagattgggcgatgcgtgcgtcaatggctctaaacatggacattgctacaaattctaaatttgatcgcaagaactatttttatccagataatccgaaagcatatcaaatttctcaatttgatcaaccaatcggtgaaaatggatatattgatattgaagttgatggtgaaacgaaacgtattggtattactcgtcttcatatggaagaagatgcaggtaaatcaactcataaagatggttactctttagtagacttaaaccgtcaaggtacaccattaatagagattgtatctgaaccagatattcgttctcctaaagaagcatatgcttatttagaaaaattacgttcaattatccaatatactggtgtatctgattgtaaaatggaagaaggttcactacgttgtgacgctaatatctcattacgtccttacggtcaaaaagaattcggtactaaaactgaattgaaaaatctaaactcatttaactatgttagaaaaggtttagaatacgaagaaaaacgtcaagaagaagaattattaaacggtggtacgattggtcaagaaacacgtcgttttgatgaatctactggtaaaactattttaatgcgagttaaagaaggttctgatgattatcgttacttcccagaaccagatattgtacctttatatgtcgatgatgagtggaaagaacgtgtgcgacaaaccattccagaattgcctgacgaacgtaaagctaaatatgttaatgaactaggcttacctgaatatgatgcacatgtattaacccttactaaagaaatgtctgatttctttgaaggtgcgattgaacatggcgcagatgttaaactaacatctaactggttgatgggtggcgttaatgaatatcttaataaaaatcaagtagatttagaagatacaaaattaactcctgaaaatcttgctggaatgattaagcttattgaagatggaacaatgagtagtaaaattgccaaaaaagtattcccagaattagctgaaaatggtggagatgctaaacaaattatggaagataaaggtttagttcaaatctcagatgaagctacactattaaaatttgttaatgaagctttagataataatccacaatctgttgaagattataaaaatggtaaaggcaaagctatgggcttcttagtgggtcaaattatgaaagcttcaaaaggtcaagctaatcctcaaaaagttaatcaattattaaaacaagaattggataaaagataatagctcatctcatatgaggtattaaatataagtttaagataaactgttcacaaagcgtttgagattgtgaacagttttttattcatatttctagagaaaaggatattggatttcattaggatagataagcaaagtatttagtttgttcctagtgtcaaaagaatgaaatattctttacttcggttagtttcttacaacatttgtacaacaaaatgatacctacaaaaatttaaaagaatgggtataaatacttttaactcattcataaatcatttaatatagtgttatgtaataaaaagtagagggataacttatgagaaaacgagcaagaatcatttataatccaacttctggaaaggagctatttaaacgtactttaccagatgttttaataaagttagaacgtgcaggttatgaaacaagtgcttatgcaactgaacgagaaggagatgctacacttgaagcggaacgtgcacttgaacaaaactatgatattattatagccgctggcggtgatggcactttaaatgaagttgtaaatggaattgctgaacaacccaatagacctaaattaggtattatacctatgggtacagtgaatgattttggacgagctttacatttaccaaatgatattatgggtgcagtagatgttattattaaaggtcatacgacaaaagtagatattggaaaaatgaataaccgatattttataaatttagctgctggaggtaagctcacgcaagtatcctatgaaacacctagtcgcttaaaatctattgttggaccttttgcatattatataaaaggtttcgaaatgttgccgcaaatgaaggcagtcgatttgagaattgaatatgataatgaggtattccaaggagaagcactattattcttactagggcttaccaattcaatggcaggctttgaaaaacttgtacctgatgctaagttagatgatgggtattatactttaattatcgttgagaaagcaaacttagctgaattaggccatatcatgacattagcttctagaggtgaacataccaaacatcctaaagtaatatatataaaagcaaaatcaattaatatttcatcatttacagatatgcaattaaatgtagatggagaatatggtggtaaattacctgcaaactttttaaatttaaaacagcatattgaagtttgtacgcccaaagatatttataatgatgagctatctgaaaatcattaaagtatttaagaattaaacgaattagggaaaatgaaataagaagttaaaaagaggttatctataatttctggtttgaaaaggtaagaagttatacgtacctctttttcatatggagtgaaaaaataatagtgatgattaataaaaatgatgtaataaaaggaaaagtgatagatttaacgcatgaaggacatggtgtgattaaattagatcgttatcctatttttgttcctaatgtgttaattgatgaagaagtagagtttaaggtaattaaagtaaagaaaaactttgctattggtaaactattaaaagtactaaaacaaagtgagcaaagagtaacacctccttgtatatattatgagaaatgtggaggatgccagttacaacatatgtcttatgaatctcagctaaaaatgaaaaaacaacaagttgttaatttatttcataaaaaggcgaaattagaggaaacagtgattcacgatactattggtatgaatcatccatggcggtatagaaataaatcccagcttcctgtaggtaaagataaaaataataaaacgataatgggatattatcgtcaaagaagtcatgacatcattgatatggatagttgcttaattcaagatgaaaaacaacaagaactaatgaatgatataaaacagtggttaaatgaattgaatgtaagcatttataatgaaaaaaataaaaaagggttattacgtcatgtagtcattcgaacaagtcattatacaaatgaagttatgattatatttgtaacaaatggttctaaatttaaagaagctgaaacgctagtacatagactaacagaggtatatcctgacataacaagtattaaacaaaatattaataattcacattcaaatgtcataatgggtaagcaatcgatgactttatatggaaaagataaaattacagataagttaagtgaaactatttttgaaattagtgatcaatcgttttatcaaattaattctgttcaaacagaaaaattatatcagaaagctattgactatgctcaattaagtggaaatgaaattgttttagatacatattgtggtataggaacgattgggctttacatggcaccagtggctaaacatgtatatggtgtcgaaattgtgccatcagctattgaagatgccaagcaaaatgctttaattaatcattttgataatacaacgttcgaatgtggtaaagcagaagaagtgataattgaatggaaacaaaaaggaatagaacctgatgttatcatggtcgatcctccacgaaaaggatgcgatcaagtctttatagaaacattattagagttagcccctaagcgcattatctatatttcatgtaatccttcaacacaacaaagagatgctcaacttttagctaatctatatcatttaaaagaaataacaccagtcgatatgtttccacatacaacacatattgaaactgtggccttattcgaaagaaaaacagtgtaattaaattaaagtaaatgaggagaagtttattaaaataagattacaaagggtttaagttatttataatcgctttcattctaacacttctacatgtatactatgaaagagttttagtgaaatgagtggaggttgacagatgcacaaaattgatttatcacacaatcgaatcaaaatatcaaaattacttaccattcaagttgttatgatgttatttgcaattttatttacatataagtgggcagttaattatgttgatattattgaacaacgttttttgacaaatgtcatttatggaatacttggttttattggagtattaattattcacgaattaatacataaatgtttattttttatcttttctaaaggacagaaaccacaatttaaatataaaaatggaattttgctcatttatttgtcatctaaatactttaataaatggcaattttgtgcagtcatgcttgcaccattagtaatcattacaatagggttaatgatttcattttaccactttgcttactcttctattatatttatatcaagcatacacatcggatattgtttgattgatatatatctagcaggtataacaattattaacaaatttaaatatattcgttctactgatgaaggtatctttatgtatcatcatttgcctatatctataaataatgactatgaataaacatctgcataagtcttaatattattataaatgcatttataaagtgttttcttttagggtgcagtataatagtattgaggcttattttatttaaaaaggagtgagacaatgacagaaaggagaatcgttcatattgatatggattgtttctacgctcaggtagaaatgagagataatcctaaattacaaggaaaacctgtcattgtaggtggaaaagcaagtcatcgaggagtcgtttcaaccgcttcatatgaagcacgtaaatatggtgttcattcagcaatgcctatgtcgcaagcacataaactatgtccaaatgggtactatgttagagcaagatttgatgtatatcgtgaagtttcaagtaagataatggaaatttttaaacagtatactgaaattgtagaacctttagcactagatgaagcgtatttagatattactcatttagttaaacctcatcgatcagcatcaaaaattgcttcaaacatacgtaaagatatcttcaataaaacaggtttaacgtcttctgctggtgtttcttataataaatatttagctaaattagctagtggaatgaataagcctaatggaatgatggttattcattatcagaatgtgcatgacatactaatgaacttagatataggtgattttccaggcgttggaaaagcttctaaaaaaatcatgcatgaacatgatatttatactggtaaagatttatatagcaaatcggaatttgaattgattcgctggtttggaaaaaaaggacgaggactttatcaaaaagcaagaggcattgatgatagtgaagtaaaagcaagtaggattcgtaagtcagtaggaaccgaacgtactttttcaacagatattaatgatgataaagagattctacaaaaaatatgggaactttctcgtaaaacatctgaacgattaactcaattgcaaaagtctggcacaacagttactgtcaaaattaaaacgcatcgctttgaaacttattctaaacaaagaagtttgagagaagcggtaagtaaagacattgatatttataatatagcttatgatttatatcatgaattaaaagaccctgatgtacctatcagattaattggtgttacagtaggtcatctagagcaatcaacatatcaaaatatgaccatttatgatttcatttaaagatagaaatagataagatgttttaaattatctatttctatcttttaaatttttaccatgaaattgaagcacactttgtaagctatcatagtgttttaataatctataagtaatcattgcgcaagcttttgcgtcattcagggcatcatgatggccatgaaaatttaagttgtaatggttcattagatgttttaatccatatcgataagctttgatcgtacgtctagcaagttgatatgagcagaaataggtaagtgagggaacagctatgtttaaatgttttaagctttgatgtaatacacccatatcaaaagcagcattatgtgccactacgggtaattgatttataaattgcaacatatatggaaagacttctttaaaatctggagcacctttaacatcctcaggatgaataccatgaacatgaatatttgtttccgaaaaatagtcatgaggattaacaagcgtgtaaaacgtttcgactatttcgttatctactacttttaccatgccaacagaacaaatacttgttctttttttatttgcagtttcaaaatccaaagctataaatgaatttttaagcattctatattcctttctaaatatttaaaatgaattattcacagtttaacagaaagtacgatttaaatataaataattgcttttttcataatctatagataacagagtaaaaaatagatacggaatttaaagggaaaaagttataattagaagtgtattgtgttacttttaattgagaatattttttgttactttagatacatgatataattactcgagtgaattatgcgaggaggaaagacatgagacaatggacagcaacacacttggctaaactagcacgcaagataagtatcgcagcaggaaaaaaaggaactgatttaccaggtcaaattgctcgcaaagtagatcaaaatattttacgaaagttagcttcacaagttgatgatattgtttttatcagtggaacaaatggtaaaacaacaacttccaatttgattgggcacactttaaaagcaaataatattgaaattatacataataatgaaggtgctaacatggctgctggaattacttcggcattcatcatgaaaaatgtaaaagatattaaagtagcggtcattgaaattgatgagggttcaattccaaaagtattaaaagaagttacaccttcaatgatggtatttactaatttctttcgtgaccaaatggatcgatttggtgaaattgatattatggttaataatattgcaaaatcaattagtaataaagggattaaattaattttaaatgccgatgatccatttgtaagtcgtttgaaaatagcgagtgatacaattgtatattacggaatgaaagcccatgcacatgaatttgaacaaagtactatgaatgaaagtaaatattgtccgaattgtggtagattattaacttatgattatacccattataatcaattaggacattatcattgtgaatgtggatttaagcgtgaaacacctaaatatgaagtttcacaatttgaggtgcaaccatttattgatatggatgtgaacgatgcgcactttgaaatgaaaattgctggtgattttaatgcttttaatgcacttgctgcatattcagtattaaaagagttaggcttaaataatgatgcaattcgtaaaggatttaaaacatacacttcaaataatggtcgaatgcaatactttaagcgtggtcaaaaagaagcaatgattaatttagctaaaaatcctgctggcatgaatgtgagtctatcagtcggagatcaacttaaagaaaaaaaagtatatgttatcagtctgaatgataatgctgctgatggcagagatacatcttggatttacgatgcggattttgaaaagttacgtaatcaaaatatagaaaaaattattgtaacgggtacaagagcagaagaattacaacttagactgaaattagctgaagtagatgttccaattattttagagaaagatatttataaagctacagctttaactatgaattatgcaggctttacagtagcgattccaaattatacgtcactttcacctatgttagaacaacttaatcgctcatttgcaggaggacgttagatatgtacgaattaacagtttttcattttatgtcggacaaattaaatttatatagtgatataggaaatattattgctttaaaacagagagcaaaaaaacgcaatattaatttaaaagttatcgaaattaatgaaactgagggagttacattagaaaattgcgatattttctttattggtgggggtagtgatagagaacaaagtatcgctactaaagagttaagtaaaattaaaacaatattaaaagatgcaatagaagatggaatgccaggtttaaccatttgtggtggatatcaatttttaggtactaaatatattactcctgatggtacagagttagaaggacttggaattttagacttttatacaaaatcaaaaacagatcgtttaacaggggatatcgtaattaaaagtgatacatttggaacaatagtaggttttgaaaatcacggtggtcgtacatatcataactttgatacattaggtcatgtggtaactgggtatggaaataatgatgatgataaaaaagaaggtattcattataaaaacttattaggaacttacctgcatggccctatattaccgaaaaatcatgaacttactgattatttattagagaaggcatgtgaacgtaaagggattccatttacacctaaacagttagataatactgaagaagaagctgcgaaatatgttattattgaacgttcagaaaaataaaaaaacgttggatgacttgaattatttcaattcatccaacgtttttttttatgctttaacaaatcgattatctagtaaattatagataagtaaaatttcataaataacatgactcttaatttgattcttatcgaattcttctaatattttgactgaagattttaaagtagatacagacttagattctcttttaaaaactccatctaaaggaatattgttgatactattactaatttttataattgccattttttcctcagtagtaaaacaaatatttacgttttttggtaaataaataatatttgataaatgtgtagcaagaagtctatcaatatatgctctatttgacatatcttttaattgtttccatttatcttcgttatttttatgatagcgtaattcatctcgttgataattcattaaagtatctgtttttttattcatattagataaggttgctaatgaagtattactattatctgaatcaaattttcctaataataattcatgacatctagaagcgaatagttcatacaaattattttctgaatgaattaagttctcttcgatttgatgataatatttaggcggtaatacgaaaaaatttactaatccagcagttactagaccaattaaagctgttaagagtcttgagaaaaaattaaaaagataggcttcatgaataccaggtatcatagcaactgaagttaatactgcaacagttgtaccaacttggagatttaattttgtacacgctaaaatagtaaaaatagcactaaaggtgtaagtaaatggagattgatcgccgaagatataagtaaaaataactgcaaacaatgcacctatgacggtagcaggaagtcgacgataaccttttcgtaaagaagctttagcagttggttcaatcgaaacaattgctgttaaaatagcaaatataggagttaagtttaatagtaaacaaaataaagttgttagaaaagtagctagacccgtttttattgttctagcgcctataatatgtttataccattgattcatattgttaaatcctctcaaagaacgaacgtgatgattataatgttagaataagtttaatatcaagtttgatgtagtgagacatcaagtcagtagatattacatttcttatttagtatatcaaaaaatttttggtataataaggtggaatattttttaaaaaggaacgggataatatgattgtaaaaacagatgaagaattacaagcgttaaaagaaataggatatatatgtgcaaaagtgcgagatacaatgcaagaagcaactaaacctgggattactacaaaagaattagacaatatcgctaaagaattatttgaagaacatggtgcaatctcagcacctattcatgatgaaaaattcccaggtcaaacttgtattagtgttaatgaagaagtcgctcatggaatacctggtaaacgtattattcgtgaaggggacttagttaatatagatgtttcagcattaaaaaatggatattatgcagatactggcatttcttttgtagtaggagaagcggataaccctttaaaacaaaaagtatgtgatgtagcacttgaagcatttgatgcagcaatggctaaagtaaaaccaggtacaaaactaagtaatattggtaaagcagtacatgctacagcacgtaaaaatgatttaactgttattaaaaatttaacaggccatggtgtaggacaatctttacatgaagcgccaagtcatgttatgaattattatgatcctaaagataagacgcttttaaaagaaggcgtagtcattgcagtagaaccttttatttcatctaaagcaacatttgttactgaaggcaaaaatgactgggcatttgaaactaaagataaaagctttgtggcccaaattgagcatactgtcattgttacgaaagatggcccgatgttaacaacaaaaattgattaagaaaaatgaagttgaaaagaagtcattttgatgtcgtcgtcccatactgataatgattccacaacatagagatgttccataaagaacgtctctatgttgggattcagcgtctctgatgatgttgaaaaaacttgtgacaaaatgtattttcaagaactggtagcatattaaaaaagaatccgggacataaagtttctgaataagtgaaaaaagacaatttctatgcctaagacaacaatgatgtcttaggcttttttatgaccaacgttgttctactttgccaaatttccaaataagagtggacataaaacatgtaatcaaaaataaagctaccaaaaaatagcttaattagtcaaagcgaatcgactgaacaatattacaaaatacacattttactgaaacacctaaaagaatagactttaaaaacacaacaccaaataataaatagttagtatcagcgataaatgaaaaactaaatttgaacatgtgaagtaaaaaatgtttaagatatatggataccaccttaaatcactcttttcaatagtattcaactcatatccttatttttaaattaaaattaatcgtacttaagtatgagaagaaaatggttcctaggactatattaagtaagattccactcatttataataaagtttagtaaacaacgaggtggttctatgaattatttagatttatatttacaacactttttaaaaataattataaaaaataatattaatgattatcgttcattattagatgataagcttcagagtatggaacgatatataaaatatttaaaaaataaaaaagaaaaaatcaatactttaattgacagtttatctgctacactagagaataagtatattgatatgataaatatgtacaatataaagaatgctcaggaagttcataataatgaaatagatttattaaaacaacgattagataaatttgaagcatattatgccaaaattgaagctaatattcatcgttgtacgaaagaacgtattgctgcagaagaacaatatgcaataattgaacaaatgagttatgtagcttaattaaaatcaggaggcgacacattgacacgtaaatatatatctactgaattattaattatttttacagcgctaatgattatcgctaacttttattacatcttttttgaaaaaattggatatttatttattttattattaggatgtatattaatttatgtagggtacctttactttcataaagtaagagggttattggcgttttggataggagcactactcatagcgtttaccttgttatccaacaaatatacgattattattttatttatatttttagtaataatcattattagatacttagtttttaaatttaaacctttgaagattgtggcctcggaagaagaagtgacctctcctcaatttattaaacaacgttggctaggtgaacaacgtactccagtatatgtatataaatgggaagatgtgcaaattcaacatggggttggagatattcatattgatatgacaaaagcagcaaatatcaaagaaaataatacgattgtagttagacatattttaggtaaagtacaactgattgttccagttaattataatattaatcttcacatggcatcattttatggtaccgcttatataaatggagaagcatataaagtagaaaataatcatgtccaagtagaagaaaaaccgaaagaagaaaattatagtgtaaatatatatgtatcaacatttattggtgatgttgaggtgatttatcgatgaatcactatttaagagcaataggatccatgcttattttagtgtatagcatgctaactgcgtttttatttatagataaagtttttgtaaatattatatattttcaaggaatgttctatactcaaatatttggtatacctgtgtttctatttcttaatttagtgattattttactttgtattatcgttggctctgtattagcttataaaataaatcagcaaaatgattggataaagaatcaaattgaacacgccattgaaggtgaaacggtaggtattaatgataaaaacatagaactatataatgaaacaattgatatttatcaaatgttagtgcctttaaatcaagaattacagcgattaagaattaaaactcaaaatttaacaaatgaaaactacaatatgaatgacattaaagtaaaaaaaattatagaagatgagcgtcagcgtttagcaagggaattacacgattcagtaagtcaacaacttttcgcagcaagtatgatgttatcagcgataaaagaaacagaactagaaccaccccttaaccaacaaattccagtacttgagaaaatgatacaagaatctcaattagagatgcgagcgctgttactacatttgcgacctttaggactcaaggataaatcattaggggaaggtattaaagatttagtcattgatttacaaaagaaagtacctatgaaagtcatttatgatatacaagattttaaagtgcctaaaggaattgaagatcatctatttcgaattacacaagaggcaatttcaaatacattaagacattctgatggaactaaagtgacagtcgaattatttaatcatcaagattatttattattaagaattcaagataatggtaaaggctttaacgtagatgaaaaagtagaacaaagttatggattgaaaaatatgagagaacgtgcattagaaataggtgcaacgtttcatatcgtatctctaccagattcaggaactagaatagaggtaaaagcacctttaacgaaagaggagggttaatatgacgattaaagtattatttgtagacgatcatgaaatggttagaattggtatttcaagttatttatctactcaatctgatattgaagtagtaggagaaggatcatcaggaaaagaggcaattgaaaaagcacatacgttaaatcctgatttaattttaatggatttgttaatgaatgatatggacggtgtagaagcgacgacacaaataaaaaaagatttgcctcatatcaaagtagtcatgttaacaagttttatagaagataaagaagtatatagagcacttgatgcaggggttgatagttatatattaaaaacgacaagtgccagtgatattgcagaagcagttagaaaaacatatcgtggagaatctgtattcgagccagaagttttagtaaaaatgagaaatagaatgaagaagaaagcagaattatatgaaatgctcactgaacgtgaaatggaaatattgttattaattgctaaaggctattctaatcaagaaattgccagtgcttcacatattacaattaaaacagtaaaaacacatgtgagtaatattttaagtaaactagaggtacaagatagaacacaagcggttatttatgcattccaacataatttaattcaataataaaaagctccttataaagaagtcaaaaaatgactatctcataaggaggtttttcgttaaaagttttcttttctatagctatttatctttatcaaatttatctttaattttatcaacaaaagagtcttgttcactatgtttatcatttggtgtaggatccacatcataatttttttcatatttagatgatgctgtagaatcgtattcatattttgtattctcattgtaatgattttcattattatcatcatgttttaaggcagcttcttcaggtgtagaacctttaatgacatgtctttgatgaataattgcattaatttcagcaccaataatgataatgaaacatgtaatgtaaatccatagtaataaaatgatgattccagcaagactaccatatgttttagaatagttaccaaagttagataaataccaaccaaatgcaaatgatcctaataaccatacaatagaagtaaagattgcaccaggataaacagatttaaacttagttttaacgttaggtgctactgaatataatgttaagaataaaataataataacgataagtggtaacaatatacgcactaaatcaaatatccaagcgacttgttgatctaaacctaacggaccaaatagatgatctttaataaaattaccaaatgtaggtaacgttagagcgatagctaatacaatagccataacaattgtaaacaaaatacttaataatttaagaacaataggattacgagcatcttcaacatcataagcgacattaaatgaattcataattgctgtcataccatttgatgctgaccaaatagctaaaatcaaaccgactgataataaactaccactagagttacttgtaatatctttaaaaattttagtaacaacatcagcagtctcagcaggagcattttgactaactaagtctttaatttgctgaggatcaatttgaaataatggtaataaagttaataaaaagattaacattgggaataaagctaatacaaagtgatacgtcatttgagccgctaaacctgaagcatcatctttaccaatacgataaataagataagataaaaaattagaatttttagtatattttgcaggtttatttaatctagaaacgaaaaaaacttgtttatcttttttaggcttctttgattgaaattcctgaggttctacgtatgtacgatcaacctttattttctctttattttctgtctctttttccttaatagagttaaggtacttagagtttgattgatttttttttgacataggcgtctccttaaaaattaattctaaaataaaggcaaaactacctaagtaaaaaggaattttgcctttattttctgtcaattatatttgattagctaagacgattgtttttacgatttacaaatgtatctttagcatctttaattgatttttctaattctggattattacgacgaatttcttcgatcgtatctttccaatacaatacttcatttttaattgaagtaattttagaaggtttacgagaacgattaccttctttaatgtctttgaatgattgtactaatgcattacgtgttgatttatctgctaaagtagcagctccaccaacgatagcaccaataataatacctggaacaaatttgttttccattttagttacccctctttcaaattagtatctttaacgatgaaatctattaaattgtcacaagatgattgtaccatgtcatatacaccttcaaaattatttgtgtaataaggatcaggcacatcagtctcttccatgttactaaattctagcaatttgaacaattgacctttaagattgggattaattgatttaatattatccacattactttggtccatagcgataatataatcaaaatcatcatcaggttcaaataattcactaacaataccatcaaaaggtatatggtgttgtttcagaattttttgagtaccttgatgaggaggttcacctaaattccaacgtccagtacccctagaatgtacaataacatcagaaataccgcgttcttttaatcgttgacgcatgattgcttcagccattgtagaacgacaaatatttccaagacatacaaaagctacatctaccatcttgtactcctccaaactttaatatataaactattttatagttatttttaacatttataaagccataattttactaatttctataaaagtttaataaatttttatactttgataaaatatgataataaagaggtgaaacaaatggcacagaataatgaacaaatgattaaaaatattcgaaaaaaattaaatattgtaaatcaatctttaattaatccagaaaaatttaaagatacagatacaaaggatattaaagacattcatgattttgttatgtctaaagattcattttcaccaagtgaaattacagcaattgctgatgaattaggtaatttacgtcacgagtaaggagaatttaaatggccaatcaagattatcaagacaaattaaaacaatatgcagaattattagtaaaggtaggtatgaacgttcaacaaaatcaacctgtgtttataagaacttctgtagaaactatagaattaacgcgcttaattgtcgaagtagcctataaagaaggcgcttcagatgtaagagtggtatatacagatcctattttagaacgcttaaaatatgaaaatgaagctgttgattattttgaaaatcatgctgttaaagcttatgatgttgaagagcgtatggattatgctcgtagaggagcagcgaatttagcacttatttccggtgatccagatttattaaatggcattgatgcagaaaaattaaaagcgtctcagtttaattatggacaagcattcaaagggtatatggaaggtagccaaaaaaatgcatttccatgggtagtagctgcatttccatctaaagcatgggcaaaacgtgtatatcctaatttgcctgaagaagaagcatacagtcaatttatcgatgaagtattcgaaattgtacgtgtggatggaaatgacccaataacaaattgggagcaacatgtgaaatctctaagtgtacatgcaaataaacttcaagaaaaaaattataaggcattacattatatgtctgaaggcactgatttaacagtagggctaccaaaaggacatatttgggaagatgcaacgagctatgtaaatggaaatcaacaaccatttattgcaaacatcccaacggaagaagtatttactgcaccagatagaaatcatgtagatggctatgtaactaataaattaccattaagttataatggtaatattattgatggattcactttaacatttaaaaatggtgaaattatcgatgttaaagcagaaaaaggtgaagaagttttaaaagatttaattagcacagatgaaggttctaagcgattaggagaagttgctctagttccagatgattcgccaatttcaaatcgtaataccattttttataatactttatttgatgaaaatgcatcttgtcatcttgctattggttcagcctacgggtttaatattaaaggcggtacagaaatgtctactgaagaaaaaatagcaagtggattaaatgattctaatgttcatgtggattttatgattggaagttcagatctaacgatatatggtattttagaagacggctctaaagaattagttttcgaaaatgggaattgggcacaataactcatttaaattaggaataggagaaataaagtatgtcaaattctcaagttaataaaaaatctatgtctgaatcaaaaagtattaaaacacgacaagtatttcctcaagataccaatcatcaccatacaatgtttggtggatcattgatggctaatattgatgaaatagctgcaattacagctatgaaacatgcgaatgcacaagtggttactgcttctactgactcggtggattttttaagacctataaaaacaggggatattacgtcttatgaagcaatggtaagttacgcaggggcaagttcaatggaaatttgtgtgcaaattattattgaagatgtgctaaataaggaaagacatttagcagcattgagctttttaacatttgttgccctagatgaaaatggaaaaccaacacgtattcctaaagtgtaccctgaaactaaaatagaaaagtggttctatgaaggagcaccaaaacgtgttcaacgaagaaaagaacgacgtgaagaaagtaaaaaaaccattgaatttttatctgaagcacagcacatagaagatatttaagatttataataaaagtcaatacatatgatataaattatgtgtattgactttaaattatacgaaagggttttagagccttgttttttaaaaatatttcaatgtaaaattacatataaatacaaagtattttggtgagactcttgaggcaataggatatgctaaagactacaggctgaagctgtgccctaagaaagcgagtcaacaatacgcagtattgtaaataaaatagccagtaaatgggtttacaataaactcatttactggctattttgctaggaattatgtcccagtttcttttaattttattgaaaactatgttcagtgtgcattgtgatttcattttctctaaagtttgtatttggataatacatatttttaactaatacatttggtcctaagcattggaaagcttcacaatgacaatttagagattttgctaaatctgttgataaccaggcattaaatacatctgtgagcttatcatgtttaatattagaaattgttccgttttcatcaccaaaatctgttacaataacgtctccactaaatacatttacatttaagcgactacgaccatctgggtcatttcgaacagtaacatttttttcatttcttaatcgttcaagtaaaagttggtcattttcatcgtttatgcaagggtagattggtagagtaccaaataacatccaagtatttttatcacgaatgtctaataaatgatgaatagcttgcttcatgtcttttaatgataatacattgagttgacttgcaaaatctgctggatacataggatgaacttcatgacgactacacttcatatcattaacaatttctttatgtatgttttctaaatgtggtagggtattttgatttaacattgtttctgctgaaacaaacatcccttggtcagataatgtactagcattatctagcatttgttcatataattttaactttgcttttaaaggaggttgttttttcattgcgccaaagcccacctctgcaaattcttggatggtaccccaattatgagaaatgtgcatgacatcaatatactcagcaatttctagatatcgatcttgaggtaacgttaaattagaattcatttgcacatatatgcctctttgatgcgcatattttaataatggtttaacaacattatttatagatttctttgaaaacataggttctccacctgtaatcgacatagtacgtaaattgggaatttcatctaaacgttgataaataagattcataggtaatggatcaggatcttttgtttgtaatgtataaccaactgcacagtgactacatctcatattacataaatttgttgtggtaaattctacattactcaaagtgagttgatcgaattgtttaatatcattataagcttcccacggatcattataaattgagattgcttgtttaatttttgatgttgtcattataaaaactcctaaacttttaaaacattcttctttataaaattacaataaatattattagaattatatctctttttgtcaaattttgttaggatagttatgaataaaagctaaaaatattatatataaggagttaaattccgatggatgaaaaacaaactattgaacaaattaaaacaagattgtctaaatttttagaagatattgatcacgttaatcctgatgaagtaagtgtaaaagatattgatgaatggattggattattagatcaattagaagaaaaagttaagttagtttctaagtaattgtggagtatgaaaaagtttttaactaaatttaatatttatgtttaaaccatcttaaatttgtctataattaaatataataaaacgaaagaaaaggtgattttggttatgactaaaaaagtagcaattattttagctgatgaatttgaagatatagaattaacaagtcctaaagaagcattagaagaagcaggatttgaaactgaagttattggagatactgcgaacgctgaagttgttgggaaacatggcgaaaaagttacagtaaatgtaagtattgctgatgctaaaccagaaaattatgatgcaatattaattcctggtggtttctctccagataatttacgtggagatgcagaaggacgttatggaacatttgcaaaatactttactaaaaatgatgttccaacatttgctatttgtcacggacctcaagttttaattgatactgatgatttaaatggtcgcactttaactgcagtattaaatgttcgtaaagatttatcaaatgcaggtgccaatgttgttgatgaatcagtagtagttgataataatattgtaacaagtcgtgtacctgatgatttagatgatttcaatagagaaatcgttaaaaaattaaatgattaatttaaaataactttttgaaagttatatttgagcctgagacatatgtaattgtctcaggcatttttaatgtgttgatagtcgatgattgaattacaatgtaactgtattctggataggctccaatgaaactgagaatgtatcattacaagtcgtgtcaattcataagcgtctgattgatttgttttccttgttttctagaaatggagaaaatacgttttaaatgttacttttaaaaattcatatatttatgaacttaatatcgttttttaaatccgcttatccatctttaaaaaatccttctctatcttcttcaaagtaacttgaaaatttgagcgatataaaaaccaatgatacaccttgagactgatttttgattgtttatatagataaaaataatacttactgttaaactctcaattatagagtgacctttaagtaaaggagcaatcccatgaaaagaagacaaagagataactatccaaaagagaaaacaacttattatcaaaatgagccttattataatacctattatcaacctgtgggttcaccaccgaaaaagaagaaaagtaaacggctctttctaagaatgtttattatatttctgattatatttgctttgtttactggattaatgtattttttatcatctagagcgaatgtcgatgatttacaaacgattgaaaataagagtaattttgtatcatcagacaatatgccaaattatgttaagggcgcatttatatctatggaagatgaacgtttttctaaacatcatggattcgatataaaagggacaacacgtgcattattttcaacgattagtgaacaagatgtacaaggtgggagcaccattactcaacaaactgtaaaaaattattattacaataatgaacgttcatttacacgtaaactaaaagaattatttgtcgcgcataaagttgaacagcaatacagtaaaaatcagatattaagtttttatttgaataatatttactatggtaataatcaatatgatattgaaagtgcagcaaattactattttggtgcaactacaaatcaaaataatagtagttatccgattattactgtattacaaagtgcaatgctagcaagtaaagttaatgccccaagtgtatatgatattaataacgtatcaaataatttcaagaatcgaattaaagtgaatttagaaaaaatgagacaacagaattatatttctgacagtcaatatcaagaagccttatcgcaacttaataattattaatatagtaatataacaatttaattaaatataaactaagagtgagaatgagaataaataaacttccatttcgctcttttttaatatcaaatactatatgtgttagattttctgttataaaataaatatattattaaaatacaatttttaattagtatgaggagaataatgatgccgaaaattactaaaatagaagttcaaaaaaataataaagaacgatttaatctctttcttgacgaagcatttgaaatgggaattgatatcgatacactcgttaaattcaatttgaaaaagaatcaaatgatagatgctgcagaaatggaaaaaattcaaaaatacgaacactatcgtctaggagttaatatggcaatacaatatttatcatataaaaaacgaactgaaaaagaagttagtgattatttgaaaaagaatgatattaatgaaatggcagtacaaaaagtgattgaatattgttataaagagcaatatattaatcatgaagattatgctgaaagtttaaaaaatacaatgatcaacacaacagataaaggacctgaagtatttaaacaaaaactataccaagttggagtagaacctaatattatagatagatatgttaaacgatatgaagaagagcaacctatagaatctatcattcatgttgctaaaaaaataatgaaaactaaaaaaggtcctgttgttaaagtaaagcaaaaagtaatgcatagcttaatccaaaaaggatatacaatagaaactgcacaatatgtacttaatgagttagactttgctcaagacgaagaagtgctagatgacttattacaaaaggatttagaaaaagtttataataaacaacgtcgtaaatatgatggtaatacattaaaaatgaaaacaatagaagcacttatgagaaaaggatataattatgataaaataaaaattaaattagcagaaagtggtattttagatgagtgacaaaagattaagtgaaatgtctgaacaggaattgagacatgaaatacaattatgtaaagaaaaaatgcgtaaagctgaaatgaatggcataatgaatgaatatgatgtttatgaaagtaaagtcattgtagctgagagttatttagtcgatcgttctaaaattaatataggcagaatgtataaattaaatgatggtagtgaacaatactttaaagttgaacgtttaaaaggggtttttgcttggggttatagaataaatagtacgaatcctgaagagggtttacccattgcattattaaaaatttagaaggatgtaacacaaatgggaagttcaatcgttttaaaattattaaatgttacacaatactatagaaaccaaaagaatagaaagtggtatttgccgtttggatatggcgcggaagacatagaattaaataaaataactttacacatttatcaaggagaagctcttgcactcataggagaacctggttcatccaaaacattgattggaagaattatggcacaagatattgcacctgatagagggaaagttgtacaatcagcaagtatttattatggagatataaaaaacaaacatttattaaatatgtctgttaaaagttatattgaagaaacacaatgcttatttaattacgagacgtcttcacacattgtcgatcaaattattaaatatgcgcatttagatgataaatcttcgattcaagtgaataaacttagtcactctgagtatgcgcaattgattttaagtgttgcaagagtttgtaaaacagaaattattattttaagtcatattctcgaatatcttgatgaagcttttttaaataaggcgaaacaactttcaaaagactatgtgtctaatgacttatcaattatatttgtagacgatgatatttctaaaatatctcaagtaagtaactatgttacatggatttctcacggacaagtgcgtatggaagggtctttaaatgacgttttaccagtatttaatgatcatgaaagagatagattaagtatcgaagatgaagaaacacttaagaattttgatttggattggaagaaaagtagaagtagattgccggaaatgagttataactttaaaagagtcgaacgatacaaacatgttaaagttccggattttatagttaaattttggacgcttttagtttcaacgttaatcgtcttagtgttacttggcgcactggtagtgaataatatagggaaaattgaaattcctatcaacgaatctcagaagaaagttcaaaatcaagacacggattcttttgaaaataaattgtcttatggaattgttctacataatgaagtgacattatcaaatcatcaagatattgaaatgccaaaatattcttttgtgacgattactggagaaagtgcttcaaaataccgcttaattgtcgatgatgatacatatgaagtaggtaagaacaaaatttattattttaatcctgctgcattatatgaaacgcataaatttagtactttagcgccttatatgaagtcaaactacagtaagtatgttgattattttaatactcaattacataaaccacataagcaagtgaaaaagacgcttgttcctgaaaaagatcaacgatttgtggtgcctattacacaacaacctattaaaatgttatttaatgatgaggataagttaactggttttgtatttcctatagtagataaatcaaaattagagcgtaaatttaatattaaaagtaatgtatggatttcaaaattaaataatggatatttaattgcagatatgaaaaatagtaaatggatttatatcgaattgtaggtgtaaacatgatagataagttaatattatattttaaacattttccatctcttttacatttggctaaagcaaaagtaaaagagacttggaaatatgatgtgattttatttttaatacaattaattatcattagtatcataattggagtgatgtatttatttaatacagaagaaattgaaaaggcccaatggatatatcgaatgattgcgttctatacttttgtaaccattgcttatattatatataaatcattcaaattatataagtatgattatcttattgctaaatcatttcaactcacacctattattacgcccatccttaatgcactgataggggctatcatcatctgtgttttatcattgattacatcaatctttaagccagtaaaccttgaaacatcggtgatatcttttgtttattttatactaatgtcgattatatttattgtttttatttcaataacattaggtttattgactttaataagtaaaaaagtatttaaattttatgtggtagcaacaattgtgttattctttttagtacctatcatttttatacctaacaataaggcaaatatgattgatcaaatattaaaaattaatccattatattatttgattgacggattatcatcttcaattgtttttggagctgtaaatatgtacaatattgtgtatcatatttattttattgcttttttagtattaattggagttatcaattttattttaactcgacttgttgcccataagaaatatgaatatatttaatatatgagtgaatcgttataaataacatatattttttataattttataataataacccctaaatgactgtcaataagtcatctaggggttgtttaaattatagttaaagttaatagattaatgagagtacaattttttttgaagtttttcttctgtaaatacccatccaatataggaatggtcaattttttgatcttgagtaagatgtgcaattgctgcaaaagaataatgtcctttatttagataacgtaaatctatcaatcttatctcagttgtttgatcatcaagtttacgtatttgccaacgatagatagaagagaattttaaaaacgttcttatttcaggattactttttatttgccataaaagtgtatcagatgagaattgttgacgttttactttatcactaaacgttatattacgaccataagctctaccaacataatcatagctttcagtttgaatagctacacgccattccataaatttcatagtaggtgcaacaaaaattttcacaggatgatgttcatcatgaatgagtttcaacgcttgagatttgattattgattgcattttaaatctaacgatataataaataattaaaacgccaataattggaaagaacactagatatggatgaatgcctaataaccatagcgtgattccaatacataatattaaaaaaataattggatcgaatgtattgattacaccgagttgtatccacttatttgatataggtctaagtgcttgtgtaccatatgaattaaagatatctacaaaaacatgtaaaaagaccgctaactgagcccacatccatatatgagtcacatctacatgtggaaagataacgtatattataaaagcaagtaatattggccataaaatcgtaaagggtatggaatgtgtaataccacgatgatgtgaaatataagttgcattattttttaattttaaaaccgtatcgccatcaggtattaaagaacccgcaattaaagttgttgcagtagctgtcatagaatgtgacattgctgggtcttgtgtagctaaagcagttagtccaatgccgatagcaatatgagtggctgtatccataaaagttcactcttttcatcttgatttaatatatattataatctaaaaattagaataacaaaattaagatacttatcaaatattagaaagtattataacttataaatttttttatgtaagagaaaggataatttaatgttaaatgaaacgacatttaaaaataatattgtgacatggtttgagaaaaatcaacgagaaatgccttggagagaaacaactaatccatattatatatggctaagtgaagttatgcttcaacaaacacaagttaaaacggtcattgattattacaataaatttattcatcgatttcctacagttaaagcgttaagtgaagcagaagaagatgaagtattaaagtattgggaaggtcttggatattatagccgtgcccgcaattttcatacagcaattaaagaagtacatcataattataatggtgaagtgccatcatcccctaaagtttttggtgaattaaagggagtaggtccatatactcaagcagctgtaatgagtattgcttttaatcgccctttagctactgtagatggaaatgtgtttagagtatggactcgacttaataatgactatcgtgatatcaaattacaatctactagaaaatcatttgaaaaagagcttcaaccttttgtacaagaagaagcgggtacgtttaatcaatcaatgatggaattaggtgcaacaatatgtacacctaagaatccgttatgcctattttgtccagtgcaggaaaattgtgaagcatttcgaaaaggaactacgttagagttacctatcaagactaaaaagcaagctaagaaaataattaatcaggaggtttttttagtcagaaatcagaaaggtcaatatctgattgaaaaacgtcaagaaaagctacttaatggtatgtggcaatttccgatgtttgaaagtcctaatgggattcaaaaactagaatataagttaaaccagtcattaactttagctgagaacgcaatatttcaattaaagcatcaatttacacataaaacttggaatttaaatgtttatagtgtgattgaagatataaatattgactcagcacaattaccagactttatggaatggtttgatttagaaaatcgagacgattattctttcccagtatcaatgagtaaaatatatgagtttattgttggtaaatagaaaaacatattatctctctatatctctttaaagaagtttaaaaaaatatggtataattcgaattgtaaaaactttaaaaggtggtgtggagtatggttaaagaatccatacctaaagaaggcgaaaatataaaaatccaaagctataaacatgatggaaatattcatagagtatggtctgaaacaacgattttaaaaggaacagatcacgtcatcattggtgggaatgatcataccttagtaactgaaagtgatggacgtacatggattactagagagcctgcaatcgtgtactttcattctgagtattggtttaatgtaatttgcatgtttagagaagatggtatttactattactgtaatttatcttcgccttttgtatgtgatgaagaagctttaaaatatattgattatgatttagatattaaagtttatccaaatggtaaatatcatttattagatgaggatgaatatgaacaacatatgaaacaaatgaattatcctcatgaaatagacgtaatactcagaagaaatgtagacattttacaacaatggatagaacagaaaaaaggtcctttcgctcctgactttataaaagtttggaaacaaagatataaaaaaattcgtaattactaagcataattgaggcaaatagtaattaattagtttatagtacttgagtaataaataagaggttgaaactacttgcctattcttaaataaatgagtttatgaatagaggattcaacctctattcattttttgataataaaattaaggaggagtcagtgtgattcgacgatatttagaatttgttaaaccatataaatatcgtattttcgcaacgattattattggaattataaaatttggtattccaatgttaattccattattaattaaatatgcgattgatggtgtcattaataatggtacattaactaccaatgaaaaattccatcatcttgctatagcgataggtattactctatttatatttttaattgtgcgcccgccaattgaataccttcgacaatatttagcacaatggacgagtaataaaattttatatgatattcgtaagcaattgtatgaccatttacaagctttaagtgctcgattttatgcaaataatcaagtgggacaagttatatcgagagtaattaatgacgtagaacaaacgaaagactttattttaactgggttaatgaatatttggttagactgtgtaacgattattattgcgctttctattatgttcttcttagatattaaattaacacttgcagcaattattatttttcctttttatatctttacagtatattttttctttggacgtttaagaaaattaacacgtaaacgttcacaagcattagcggaagtacaaggatttttacatgaacgtgttcaaggtatgtctgtaataaaaagctttgcaattgaagataatgaagcgaaaaactttgataaaaaaaataaaaactttttaagtagagcgtttcaacatacttcatggaatgcctattcatttgcagctattaatacagtcacagatttaggtcctatcattgttattggagtagggtcatatttagcaatcactggttcaattacagtaggtaccttagcagcttttgtaggatatttagaacaattattcggaccattaagacgtttagtttcttcattcacaactttaacgcaaagtttcgcctctatggatcgtatttttcaattaatggatgaagactatgacattaaaaataaaaaaggtgcacaacctattgaaataaaagaaggacatattgaattaaaaaatgtaagctttaaatataatgaagatgaatctttagttttaaaaaatataaatttaaatataaacaaaggtgaaacagtagcattcgtcggtatgagcgggggaggtaaatctacgcttattaatcttattccacgtttttatgatgtaagtgaaggtgaaattttgatcgatagtcataatattaaagattatttaacaggaagcttgagaaatcaaattggacttgttcaacaagacaatattttattttctgatactgtaagagagaatattttattaggacgtcctgatgctactgaagaagaaataatcgaagcagctaaaatggcaaatgcgcacgactttattatgaatttaccgaatggctatgatactgaagttggagaacgtggcgtaaaattatctggtggccaaaagcaacgtttatctattgcgcgtattttcttaaataatccacctatattaattttagatgaagcgacaagtgcacttgatttagaaagtgaagcaattattcaagacgcattagatgttttaagtaaagatagaactacacttattgtagctcatagattatcaacaatcacacacgcagataaaattattgttatgcagcatggccaaatcgttgaaacgggtacacataaagagctgattgctaaaaaaggtgaatatgaacatttgtatagcattcaagatttataactaaataatgaatactaaaaaagacaaactcaactttgatagttaagtttgtcttttttagtattgatatttaatttttataaatcaaagtcttcatcttgaatttcaatatctgtgtcattacgatgatacgtaaagaaacttaatcttagtctatctaaatgctctaaataatatcgatattcttcaatagctgcgataatttgcatgatattcgaatatgaatattctacttgatatggattttgaattaattgatattgaaaagcatccataagatttttcttttgaggatttaaaatttgattatcaaaatcatctacattataacgcgccttttttgataaactttttaaaatttgttcatgatacgctgttaatgaatctaactctaatttaatttgaaataataaattatgattcgtattatgcaaatcattttgatatctagccatacgatttaatacttcgtaagcttgtcgagttgttccaacgacctctttaaataatatctttttacgattttgttggaaagcagcttttcttgtaaacgtacgttcttcgtgataatagttatagatttgttctaattttatgatgcgagattctaactgttcaccatcttcttttatctgatgatattcagaagtatcattaatcacaagtttaaaccatataaatatgtcggaagaaatattaaccgcattatgataaattttagtttcgaattttggaggtaagaatactaggtttacaagtgaagcacttaaaactccaatcattactaaaataaatctaaatgtagctgcaagataaaacgatcctgtatgttgccccataatgattaacgcagtgacacctgctaatgttgctacatgcgccaagtttaatttgtataaaatggcgattaatagaatgactgtgatacccataatcacaatgtttttaccaaaaatggttaccataatcactgctaatatagcaccgattaaattacctgtagcttgttcagatatcgttttcattgaacgatatatattaggttgcattgcaaaaatagcacttattcctgctacagacttcaaaccaacattatcaggtaaaaaagaagcgataaaaagggcgagaatgatagcaattccagttttaagtatacgtgcgcctaatttcaaatacaacgctcctttaaataacaagtttatagtttaatgtatttttaaattagtatacactcaacaaataaaactatacaagtatacgcatatataaaaacccaagaatgtatatttacgatatgacattcttaggtccgttaaattttaaatattatttcatttgactgaaggcatagtcagccgcttctaatgttcgatcaatatcttcttcagtgtgttcagtagttaagaaccatgcttcaaatttagaaggtgctaaattaataccttggttaagcataagtttaaagaattttgcaaatgcctcaccatcagaattttctacttgttcgtagtgtgttactttttcatctgtaaaatagagtgttagcgatccataaatacgattaattgttgcagtaatatgatgtttttcgataagtttatttaaaccatcttctaaacgtttacccaaattatctaatttctcatatacaccatcttgctctaaaacttcaagtaatgcaatacctgctctcattgaaagtgggttacctgccattgttcctgcttggtatgctgggcctaatggagcaacatgttccatgatatcttgacggccaccgtagccaccgattggtaatccaccaccaacaattttaccaaatgctgttaaatctggataaacatttaataaatcttgtgcagcgccataatggaagcggaaagcagtgatgacttcatcgtaaatcactaaagccccatgttcatgagttatgttgttaacttcttctaaaaagcctggttgaggttttaccataccaaaattacctacaataggttctactaatacagctgctacttcatctccccaatgtgacatggcttctttataagattcaatgtcattgaaaggtacagtaatgacttctctagcgacactttcaggtacaccagctgaatctggagaacctaattgagaaggtccgcttcctgcagcaactaatactaaatcagaatggccatgataagaccccgcaaatttaataatcttatttcttttagtataagctctagcaactcgaattgtagtcattactgcttctgttccagaattaacaaaacgaattttttctaatgaaggaatagctgctcgtaattttttactaaaatcaatttcaagttcagtcggtgtaccatataacacacctttagccgcttgatcttggatagcttcagtaatatgaggatgagcatgaccagtgattataggaccatatgcttgtaaataatcaatgtacttatttccatcgacatcgtaaagataagcgccatgaccttcacgcataactacgggagcacctccgccaacagctttataagagcgtgaaggagaattaactccacctaaaatatattcatttgataacttttgaagacgttcactttcagtgaaattcatagagtatcaacctttcttatttaataatattcattactatcgtaacataataattataatatgaagaaatgagtgatacgatgttaaaaataggagatctttttccaaaatttgaattagagaatcaaaatggtgaattaattactaatgaaaaaattatgggagaaaaaacaatattatatttctacccacgagataacacaccaacgtgtacaacagaagcatgtgactttagagataatatacaatactttaatgatatgaaagttaaagtttatggtattagcggggattctagaaaaaaacacgaaaactttattaataagcatcatttgaattttgatttgttagttgatgatgaatttaagttatcgaaggcagtaggaatatatcgtttgaagaaaagttttggaaaagaaaatatgggaatagtgagaacaacgtttgtaatagatgaagcgggatatattacaaatatcattgaaaaagtaaaagttaaaacacaaatagatgaattaaaacaaatgctggagtgagataaatgaaaatcgtaagcttgaaacgtttaggtaatatagaaaatgaattaatagaaaagtatcctgatatttcatttttgttttatgataaagcagataatattccagataatgaaaaaaaagaactcgaggtattgatagggtatgacggggagattaatgaaagatttataaagtcttgcccgaatttaaagtggattgcatggtatgcaacaggcgtaaacaatctaccattagagtatattaagaataaaggaattattttaaccaatactagaggaatacaatcaaagcaactttcagaatatatactaacttttatattagatgatcataaaaaaatgaaaacatcatttattaatcaacaaaagcatatttatgatagtactttgacaggtaaacgtttaaaggatgaaacaattttatttttaggtactggagctattgctcaagatactgtaaagttattgacacctttcgaattgaaaataataggtgtaagtaaaacaggaaaacaaaaagaaggatttaatcaaacatatgagataaatgaattagacgaactattaggagaagcggatataataattaatacgttaccagaaaccaaagaaacatatcatttattaaacaaacatcacttccaattaatgaaggaagataccttatttattaatgtaggaagaggaactatagtagaagaagacgatttaattaaaatacttaaagaaaaattaatacgtcatgcttacttggatgtattcgaaaatgaaccactagaatcagaacatccactttatgatttagataacgtgacaattactgcacatataactggtaatgataaagaaaataaaaaggaagcaacgaaaatatttgaaagaaatctatctcattttctcaataaagaagaaataagtgagaacgtagtagacttaaaagatggctattaatataaaacttatggaataattgacaatgccgtatgaaagtagttatattattaataagataataataattataaagtagaaagatggtgaaaatgatgagtgcagaaatagaatcaattgaacatgagcttgaacaagctataatagcattaagaaagtcaggcgttcgtatcacgcctcaaagacaagctattgttagatttttaattagctcacatacacatcctacagcggatgaaatttatcaagcactttcacctgattttcctaatataagtgttgcgacaatttacaacaatttaagagtatttaagaagataggtattgtaaaagaattgacttatggagatgcatcaagtaggttcgactttaatactcataatcattatcatgttatttgtgaacgatgcggtaaaatagtagatttccactatcctcaattggatgaaattgaacaattagctcaacacgttacaaactttgacgtaacacatcatcgaatggaaatttatggattgtgtgaagaatgtaaaaataaagaataaagttaggcaatgactttaatgtcattgctttttttgtttataagtaatcaaagaatttaaaagataaatattaaataaaaaataccatagagttttagtataaaaaatactcattaaagataatgaatacatttagtgtgaaatattaaacgattttatattataaaattcattgacgttcaataataaacttgctattatataaaagtcgtcaaaaacaaaagatattgtttgaaaacgcaaagtaaattagtttaaaacaatgttaagaaagtgtaattttgactattgattataaaaacaatttattataagatattatttgttgaaatattaattaacttcaagaaaagaaaaattaaaaaagttcttgacaaaaataattagtatttgatacaattaataaatgtaattgttaaaacgaacattgaaaactgaatgacaatatgtcaacgttaattccaataaagtaacttaaatgttacaaacactatttagtattatgagctaatcaaacatcataaatttttatggagagtttgatgtaatgaggcagcaaatgaaaaaaagaatagaaataataacattaatcatagttttaatcatcttagtaacattattcgttatattcttaatgaaagtatataaaacaaatcataaagatacagaatataacaaaattaatgataataaaacgtatttacaaaaaagagattatcatgtatcgaaattgccacatttaaagataattgaagtcgaagaaccacatatcaaaaatattgatgaatatttaaaagcaattcattttaatggggcagttacagttcttgaaaatggtaaattaaagttgaataaaggatacggttatcaaaattttcatcataaaactaaaaactcaccaaatacaatgtatttaattggttccgcacagaaatttacaactggattaattctaaaaaaattagaaaatgaaaataaagtgaatataaatgattctgtcactaaatatttaccttggtttgaaacgacaaaaaagataactttaaaagatctaatgttacatagaagtgggctatataaatttgaagcttctcctaaaactaaaagtcttgatggtgcagtacatgcaatacaagcaaggggaattgatgaaaaattttatcataaacatttatataatgatgctaattacttagtgcttgctcaagtaatagaagtagtcacacataaaccctatgctgcgaattattatgatgatttagcacaaccatttagtttacaacatagtgcgttctttaatgaaaaaccatataaaaaatatatggctacaggatataaaatgattgacggtaaattaactgctatgaaaccaaatatattagctcaatattatggagcgggtaatttatatatgacaacatatgatatggctcatttagtaaataatttaaaaaataataatatttttagtgaatcagtgtcaataccactgactcagcaattaggaacaacgtcatatcctgaatcttatcgttacggattttatgttacaccgcaatataacagaattaatggtgtattctatggacaaatatttaccgtctatttcaatcaacattatgtcatcgtacttgcttcaaatataggtgataattctaaagtaacaaatgaaaatcgaatctcatatatttatcataaaatactaaatcaacaatcttattatcaataagagtaaaattaaatattaaaaggtcggaacattaattgtttcgacctttaattttttaaagtatttaaaaatattgttttataatgttcatttatacttgatacgactacagaacaattaggataggaagattcaaaatcaactacagtagcaccacgagtcagtgacccttgtaattcaatttgcacatctgcttctttaatttcataactcttaggatcaagtaaataaagaatcgtaaatgcatcatatagttttattccttctttaaaatcttcaccgcgatagtgttggaaaatatgatacaacatttgtgttgtgttgttttcatctttaagagtgtctaaataagaatgagtaaataatgattgacgcgctaaatctaagccaatcatcgttaaaggtaaaccagcattaaaaacgatatgagctgcttcaggatcacaataaatattaaattcagctaggggagtaacattacctcttccagtactaccacccatcataataatttctttaacatggtttttgcattcaggatacgtattaaaaagtagagctatatttgttaaagggcctaaagttacaagagtaataggttcattagaatgacttaatatctcattcatagcttctacagcatgagaagacgctaaatctgaagtagaaattgtagggaattgatagccatccataccactttctccatgaatatgactagcatcttgtatttcacttattaatggttgagaagctcctctatgaatagggacttcactgttgaaaaaggcttttaattttaaagcattcgctgtggttttctcaacacctacatttccatttacagtagaaatcattttgacatcaaattttgtatgagataatgcaagagcgattgctgctgcatcatctatacctggatcagtatcaataataataggtaatgacatgaatacacctccaaagatttttactttttcttatatctatcatacacaaagaagtaattaatataaacaaaacaaaaagcctgtacaagttaaaaaactcgtacaggttttttaagaaaggtagaaattgaattataagtgactagaatgtccaccttgcataacccaataagtaccaataactgtgattaaagtaataataatcgcaaagataactttggcagattgtaaacgtccatctttaccttcagttaagtgcatgaacattaataattgtaatgcagcttggatgaaagcaaaaccaaagataattgttgttttagcatggaatgtcatgtttgtgtatagagttacaaaaactgctaataacgttaaaacgattgaagcaataaagccaactgtatgttttacgattgtgttcatccgctatacaccatccctatcatatatacggcagtaaagatgaagatccatacaacatctaagaagtgccagtataaacttactataaataattttggagcattaaatttatttaatccacgtgttgctacttggattaataaacaaataatccaaccgatacctaatgaaacatgggcaccatgtgtacctaataggatgaagaaacttgaccagtaagagcctactttaggtgttacaccttcagaagcataatgtgcaaattcataaatttcgaatccgacaaatactaagccaaggattactgttaaaatcatccaaaacatcattttacctttttcttctttacgtaagtagtaaattgaaataccacaagtataagaactgattaataaggcaaatgtcatgattaggacaagtggtaattcaaacaattcagttgtcaatttaccaccgtaaccgcccccatgttgcaacgttaataacgctgcaaatagggtaccgaataatgcaaattcggctgtaaggaaaatccagaagccaagtttattcaattgaccttcatgcgtacgtgaatcaatagtgtttgtatcatgactcatgacctacagcctccctttctttaatacgtgcttctcttaaacgtgcttcgttttcagcaacttcagaagctggaatatgataaccgtgatcttgtacgaaactttgataaatcatagttccgaagataccagctacacaaattaggaatggaatgatagattcgaagattaagaagaaaccaccaactaacatgaatatacccataaatacaccagtatgtgtgttgttaggcatatgaatgtctttgtagttatgattgtctaagaaatgacgaccatgttctttcatatcaacaaatgtatcatagtcattccaatctggagtgattgcgaagttgtatttaggtggaatagcagaagctgttgaccactctaaagtacgacctaaaccatcccagttatctccagttgcttcacgtggagatttaatgtggctgtagataatgcttgctactaagaataggaagccgactgccatcattaatgcaccgatagttgagatgaagtttaataaccaccaaccatcagatggcatatatgtgtataaacgacgtggcataccgtctaaaccaagaatgaattgtggtaagaaacatacgttaaatccaatcatgaataaccagaatgcccatttatttaatttttcatttaatttgtaacccatcattttaggataccagaagattaaaccagctagacaggcaaatactacaccagtaaccaatgtatagtggaagtgagctactaagaaataagtgttgtgatattgatagtcagctgatgccattgctaacattacaccagtaaccccacctaataagaagttagggataaaggctaatgagaataacattggtgactcaaaagtaatacgtcctttatataatgttaataaccagttaaataatttaactccggtaggtacaccgattaacattgttgagattgagaagaatgagttaattaaagcaccattacccattgtgaagaaatggtgaacccaaactaagaaacttaagaacgcgataccagcagttgcccacaccatactttggtgaccgaataaacgtttacgagcaaatgttggaataatttctgaataaataccaaatgcaggcaagataacgatataaacttcagggtgcccccatacccagaagaagtttgcccataacattggcataccgccatctgctactgtaaagaaatgagttccgaatactctatcagctgtcattaaagcaagaacaactgtgaatactgggaatgctaaaattacgattaatgtcgtaataaaagtagttacagtaaacataggcatttgcataaacttcatagtaggtgttttacatctaagtattgttacaaagaagttaatacctgtcattaaagtaccgatacctgaaatttgaattgctactaagtagtagttaactcctggaccaggactaaattctcctgctagtggagcatagtttgtccaaccagctgctggtgatccacctacgataaatgataggttaaataaaatcataccaacaaagaataaccagaagctgatgttgttcattacagggaatgccacatcacgagccccaatttgtaaaggaacaacaacgttccataaaccgaaaacgaatggcatagccataaagataatcatgataacgccgtgcgtactaaaaatttcgttatagtgatttgattccaagaaagtattatccggaatagttaattgagtacgaagtaataacgcatcaataccaccacgaacgaacattaatactgcacaaattaagtacattaaaccgatttttttatggtctacggatgtgaaccattctttgtatagatatttccataatttgaaataagtaattactgcgattaaaccgataactaagaatggggcaccaatttgtgccatagtaatcatccagttacctttaacgagtaattcatcccatggaaaattcattaatgttcacctccatgatcattatctgctttagacgcattctcgtctttagctcctttattgattttttccatttccttagcgttgtgagtttcttcatctttgaactcactatcgtaagggtcatcgttgcctaaaatcattggcttcataccatgacgaggatagttgacatttgtaactgttaccttacgagctggtttttgaggtttatctgttacatctttgtaaagatctttttcagcaacgaagttaggatctttttgagtatagttgtaacgtttatatgcatagaagatatactctggatcagctgcaggatcgacaaatgccatgtgagtaccactaaatgttaattctttatttggagtacttggtaagatttgtttatcaaactcatcttggctaatagttttcttacttttagcatctttaacccaagcatcgaaatctttttggtttacagagtgaactttaaatgtttggcgagagaaaccttcaccattgaagttagagttacgtcctctgaatgtaccagtttgatcggctgttaaagtccaattcattgtcatgccagtcatggcatatttttgaccacctaattgaggaatccagaaactagtcattgtatccatagattgtaatttaaatacaactggacggtttttaggaatagttaatgtattcactgtttcaaccttttgttctggataagcaaagaaccatttatatccggcactaactgcatagacaactaatgggtcttctttactttcaggtggtttctcgtaatcgtataatgttttaactgttggaatagctaaagcaattacgattaagattggtaccacaaaccaaattgtttcaattaaagaattgtggtgcatcttaccagattcgtcatttttattgtaactatacttgaaaataaaaacagcgaacatagtaagtacaacagcaacaataacaagcatgaagatgattgagtaaataatcaagaacttctgactacttgctactggcccttttgcattaaacacttctatgtttgaacaaccactaagtaaaattagtgtgccaaacataagaagcaacgacttaaattttgacacttttttgacctcctaatactacaaatgtagggcttaccattaattttagtttattacgcgatatttacaagaccttattagaaaaaaattacaataataaataggaaaaaactagtaacaataggaatgacggggaatgtaaggtttgttaaaattatgtgtctattctgtgaaaaatgtcaaaaatagaaaattgttcgttacatttgagaaacattatcaattctagcgtttacaataaaaattaaataaaaaagacgagatattcatctcgtctttttcagaaaattgacacatttatttaacttttatgtaacgtgttgatgattcttcggctccctctgagtcgatgacattatatcttactttataagtacctacttttgacgtatctacgtgaccatcaactgtaattttatgtgttaaatcaccatcttctttatcataggcactaattccatttaatacattataatcttgacctttttcaataacaatatcgtttactcctttaagctgtggagtatgatttgaagtagcttctgcacttaaatttggagtcacaagagtagcggagacaccgagagctgaaagagattgtatgagtttattcattacgttaacctccgaatgtaataagtcatttgaataatttaactatactttaatttctgatttttaacatcatactatagtcttaatatagcttattcaagattaaatttaaatgaacttaagataaataaatattaaatttatgtaaaatgaaagttctgtgaatttaaaaaaatctatattacattataataagtattgtactaaaatatatttgtagtaaataaatatattttacacatataattttaagtaggagtggatttgaatgttaacagaacaagaaaaaggaattgtaaaagaaactgttccagtattacaagaaagaggaacagagatcacttcttatttttacaatagaatgtttcaacaacatccagagttaaaaaatatgtttaaccaaactaaccaacaaaaaggattccaatctactgctttagctcaaagtgtattagcagctgcagttaatattgagcatttagaaaatattttgccagttgttaaagaaattgcatataaacattgtgcgttgcaagtaccaccagctggatatgatatcgtaggagaaaacttaattgaagcaattaaagctgttttaggattagaagatagtcatcctattattcaaacttggaaaaaagcatatcaagaaattgctgatgtatttattcaagttgaaaaagatatttatagtaaaatgttatgggaaggtttccaaccatttaaaatagaaaaaattgaacaactttcatctgatattaaatcctttactgtagtatcagataaatatgatttaagtcaatttacaccaggagaatatattacagttgatgtaagtagtgaaaaaatgccttatcgtgcaaaacgtcactattcaattgttagtggcgataacaatcatttaacttttgctgtcaaacgtgatgtatctacagaccatgaaggtgaagtttcaactattttacatgatgaattaaaagaaggaaatgatattaacttatcagctccagtaggtccatttggtgtggttaaccaaaatcaaccacaagtatttattggtgcgggtattggtgtcacaccacttgtttcaatgtttgataaagtagctgaaaatggaagtcatgcacagtttattcaagtaactggagacgttaacgatacaccattcacttctcatttaaaagatatttcaaaacgctacgacaacgcgaaatatgaattatatgatagacaagctaaaggttatttaactaaagaaacgcttgaaaattatgtgaataatgatagtgaagtatatgtttgtggaagtgctaaatttattcaatcagtgattgaagtattaaaagaaataggcgtaagccaagaacatattcattatgaaacatttgttccaaaattaagtgtttcagtataaatgtaatatattattaaaaaaagagagaggcataattaatttgaaattatgtctctctctttttttataataaacgtttgaatttaaatcattcaatgcctctacgcattttttcagctaataatgtattatttaaaaccatagtaatggttaaaggacctacgccacctggtactggagtaatagcacccgcaatttcttttacttcttcaaattcaacgtcaccttttagtttaccattttcatcaggagtattacctacatccacaatcactgcgccttcttttacatcgtctttagtaactaatccaggtttacctactgcactgacgataacatctgcatgttttaaatggctatgcatatctttagtacgtgaatgtaagattgttactgtcgcatttgcttgtaataataacttagacacgggttgacctacaatgtgacttcggccaattacgacagcatttttaccttctaaatcgatatctgcatgttttaaaatttccataattcctaatggtgtacaaggaacaaacgtttgttcatcaatgtataatttaccaatgtttgatgggtgaaaaccatcaacgtctttttctggattaattgcttctaaaattttttgttcgctaacctgtttaggaagaggtacttggactaaaataccacttaccgaatcatcattatttaaacgatctagttcttttaatacgtcttcttcagaagtatcttcagataaatgaacaatttcagatatcatccctattttttcagcagctttctttttagaattaacatagctttgacttgcaccatcattcccaactaaaataacggataattttggtgtatatcccttttcttttaaaatttcaacttggtcttgcaacccttgtctataatcttttgcaatatgtttcccatctaaaatttttgcaaccacaaaaaattcctccttgtttattaaacatctgtctatagattaactttaaaggtataaaaacgtcaaattttagctaaaaagcgtaaattaagttaagaaacatagataaagttcgatttttgattgaaattaactcttatacttggtatgctatacgtgtaatatacaactaataagatttatattttaaactttgaaagggtgtacaaagtgaaagtagcagtcattatgggtagttcctcagactggaagattatgcaagaaagttgtgcaatgttagaacaatttgaaataccatatgaaaagaaagtagtgtcagcacatcgtacgccaaagttaatgtttgattttgcaagtgaagcacgtacaaacggttatgacgttattattgctggcgctggtggtgcagcacatttacctgggatggttgcttcaatgacaacgttacctgttatcggtgtacctattgaatctaaaagtttaaaaggactagattcactattgtctattgttcaaatgcctggtggaattcctgttgctacaacggcaatcggtaaatctggggctaaaaatgctggtattttagcagcgagaattttaagtattggaaatgattcagttcgtaaacatcttgaacaatatgaacaatctttagtagataaggtaggcgaaatgcaagatgaacttcaatagattaaagttcggagcaacaattggtattattggtggaggacaattaggtaagatgatggcacaatctgcccaaaaaatgggctttaatgtagcgtgtttagatcctaatccagatagtccatgtaaatcagtagcagatgtttttatcacggcagagtatgatgatgaagaagccttaaacaaattgggtcaacaatcagatgtgattacttatgaatttgaaaatatatctgctcaacaacttaagcaactaactcaacaatttaacattcctcaaagttatcaagcaattgaattattacaagatcgtttaactgaaaaacaaacattagaatctgcaggtacgaaaattgttccttatgtatctttaaaagatgaaaaagatttgaatcaagcaattgaaacattaagttatccatttatcgtaaaaacacgttttggtggatatgatggtaaaggacaaattttagtgaaaaatgattccaatgttgaagaagctaaagtacttgtttcaaaacatgaatgtgtggcagaaaaatttttagatctcgatcgagaagtatctttaactgtaacgattggtaatcaaaaacaaattgcttatttcccactacaagaaaacgagcatcgtaatcaaatactatttaaaactattattccagctagatgcgataaagagcaagaagcgagaaaagaagtaaataaaataatcgaaaaagttcactttgttggtacttttaccgtggaattctttattgataaatcaaatcacttatatgtaaatgaaattgcaccgagaccacataactctggacattatacgattgaagcatgtgattattctcaatttgatacacatatcttagcagtaactggtcaagatttacctcaagagattgaagttttaaaaccagctgtgatgatgaatttactaggacgcgatttagacttattagaagataaatttggagatcatcctgaatggcatgtccacatctatggaaaaacagaacgaaaaccggatagaaaaatggggcatatgaccattcttacaaataatgttaatgaaactgaaaatgaaatgttgaaacaatttaaagggagagaataatcaatgtcattactttatgaaggtaaagcaaaaagagtattttcaactgaaacagtacatcagttgagagttgaatacaaagatgaagtcacagcaggtaacggcgccaaaaaggataagatgcaagggaaaggacgtttaaataatcgaattacttcaattattttcgaatatttaaataaacatggccttgaaagccattttattaaacagctttctgaaactgagcaattagttaaagaagtaaagattataccactagaagtagttgtaagaaatattgcaacaggttctattacgaaacgtttaggttttgaaaaaggccatgtatttgacgaaccacttgtagaattcttttataaaaatgacgatttaaatgatccattgattactgatgatcatgtcaaattacttcatattgctaatgatgaggaaattaagacattaaaagatatggctaaaaatattaataaagtattaattcaattaatgaatgaaatggatttaagattagtagattttaaagttgaatttggaaaaacagaaaatggtgatattttattagcggatgaaatttcaccagatacttgtcgtatttgggataaatattcagatacgaatttcgataaagatgtatatagaaatgatactggttctttaatagatacgtatcaaacatttttggataaattggaggaactaaaataatgaaaacaattgaacttcacattacattacaaccacaggtattggatacacaaggtcaagcattaaatcgtgctgtgcatgacttaggttataaacaagttaatgacattagagtaggtaaagtattatatatgactgttgatgaagctacagatgaagcagtaaataatattattacgacattaagcgaaaagttatttgctaatacggttattgaagaatatagttataaaattgttgatgaaaaggagaatgcataatatgaaatttgcagttctcgtttttccaggatctaactgtgatagagatatgtataatgcggctattaaaacaggtgcagaagctgaatatgtagattatcgtgaaacatctttaaaaggttttgacggggtattaattccaggtggtttttcatttggtgactatttacgttcaggggctatggcaagtgtcgctccaattattagcgaagtgaaacgttttgccagtgaaggtaagcccgttttaggtgtatgtaatggattccagattttaactgagataggactattacccggcgccttattacataatgattcacatctatttattagcagaaatgaaaaactgaaaattgttaataatcaaactccttttactaatttatatggagaaaatgaaattgttgtttatcctgtagcacatggagaaggacattattattgtacagatgatatgtacaatgaattagttgaaaataatcaaattattttaacatatgaagataacccgaatgggtctcatgaacatattgcaggtattgtaaataaagcaggcaatgtatgtggaatgatgcctcatcctgaaagagcacttgaaacacttcttggtacagacagtggtgttaaattattcgaagcaatggtaaatagttggagggaacaaaatgtctaagtttatcgaacctagtattgaagaaattaaacttgaaaaactatatcaagacatgggtttaagtgatgaagaatataataaggtacgtgagattttaggaagagagcctaactttacagaagtaggtattttctcagtcatgtggagtgaacattgctcttataaacattctaaacctttcttaaagcaattcccgacaactggcgagcatgtccttatgggaccaggtgaaggtgctggagttgtagatattggtgataatcaagcggtagttttcaaagtagaatctcacaatcatccttcagcaatcgaaccttatcaaggtgcagctactggtgtaggaggtatcatcagagatatcgtatcgattggagcaagacccattaacctactaaatagtttgcgattcggtgaattatcagtaaaacaaaatcaacgtttattaaaaggcgttgtccgtggtattggtggttacggtaattgtattggtataccaactacagcaggagaaatcgaattcgatgaacgttacgatggaaatccacttgtcaatgcaatgtgtgtaggtgttatcgatcacgatatggtacaaaaaggtactgctaaaggtgaaggaaattcagtcatttatgtaggccttaaaactggacgtgatggtattcatggtgccacatttgcatctgaagaattaactgaagaaagtgaaagtaaacgaccttcagtacaaattggtgacccatttgtaggtaaaaaattaatggaagccacacttgaagcaatcacatttgatgaacttgtaggtatccaagatatgggagcagcaggtcttacctcttcttcatcagaaatggctgctaaaggcggtagtggattagtactgtatctagatcaagtcccaacacgtgaaccaggaatctcaccatatgaaatgatgttatctgaaacacaagaaagaatgttacttgttgttgaaaaaggaacagaacaaaagttcttggacttatttgataaacatgaacttgatagtgcagtaattggtgaagtaacggatactgaccgcttcgttcttaaatacgaagatgaagtgtatgcagatattcctgttgatgcactagctgatgaagcacctgtctatattttagaaggtgaagaaaaagaatataatacctcaaaaaatgattatagtgagatcaatgtacaagatgtatttaagaaattattaaagcatccaacaattgcttcgaaacattatttatatgaacaatacgatcaacaagtaggtgctaataccattattaaacctggactacaatcatctgtagtaagagttgaaggaacaaataaagccattgcttcaaccattgatggtgaagctcgatatgtatttaatcaaccttacgaaggtggaaaaatggttgtggcagaagcttatagaaatttaattgctgtaggcgcaacaccattagctatgacagactgtttaaattatggttctccagaaaagaaagaaatttaccaacaattaattgattctacaaaaggtatggcagaagcttgtgaagtattaaaaacaccggtagtatcaggaaacgtttctttatataacgaaactagaggaacttctattttccctacaccagtagtaggaatggtaggactcattgaagatattcaatatttaaatgatttccatccagaaacagggcatacattatatcttgtaggagaaacaagaaatgattttggtggaagtcaaattgaaaaacttttatatagtaaagtcaatcatgagtatgaagaaattgatttaggtgatgaagtggcaaaaggcgaagcaataaaaacatctattagaaatggaattgcttctcatgtacaaactgtaggtaaaggcggtttacttattacgcttgctaaaataagtgcttattataatttaggattagaagcaaaagtagaactctctgatgcacaattatttagtgaaacacaaggacgttatgtcgttgcagtcaaagaaggacaaacactagatgtagatggagctattaaaattggtgaattaacagatgttgatgaatttaaagtatctaatactacatctacaattacagaaaaagtctcagatattaaagcaatttgggaaggagctatttcagaatgtttaactacagtggattaaacgaagaatgcggtgtctttggcatttggaatcattcagaagcagctcagttaacttatatgggattgcatagtttacaacatagagggcaagaaggtgcagggattgtagtttctgatgaagatactctaaagggtgaacgtggtttaggtttacttactgaagccattaaagaaccacaacttaataaactaaaagatggcaatcatgctattggacatgttcgttatgcgacatcaggaaataaaggtatcgaaaatatccaaccatttttatatcatttctacgatatgagtgtcgcaatttgtcataatggtaatttaattaatgcacaaactttaagacagtaccttgaaaaacatggtgccattttccactcatcttctgatactgaagtgattatgcatttaattcgtcgtagtaaagctcctacatttgaagaggcgctaaaagaaagtttacgacaaattaaaggcggatttactttcgcaatattgactaaagacgctttgtatggtgctgttgatccaaatgcgattcgtcctctagtagttggtaagatgcaagatggaacatacattttagctagtgaaacatgtgccatagatgtgctaggagcagaatatgtccaagatattcatgctggagagtatgttgtcattaatcacaatggcattgaagtaaaatcatatacaagtcacactaacacagctatttcagcaatggaatatatttactttgcgcgtccagattcaacaattgctggaaaaaatgtgcatgcagttcgtaaagtttctggtaaaaaattagctcaagaaagtccggctcaagcagatatggttatcggtgttccaaactcatcattatctgcagctagtggctatgctgaagagattcaattaccttatgaaatggggcttgtgaaaaaccaatatgtcgcacgaacttttattcaacctacacaagaattacgtgaacaaggagtacgcgttaagctatcggcagtgaaagatattgtagaaggtaaagacattattttagttgatgactctattgtaagaggaacaacaagtaaacgtattgtcaaaatgcttaaagatgctggagcaaataaaatacatgtacgtatagcttctccagaatttatgttccctagtttttatggaattgatgtgtctactactgctgaattgatttctgctagtaaatctccagaagaaatttgtgagtatattggtgcagattctcttgcatatttaagtgttgaaggtcttatagaatcaattggattagattttgatgcaccatatagtggattatgtgtagaaagttttacaggagattatccagcaggtctatttgactatgaagaaaactatttaaataatttaagtacacgtcaaaaagaatatattgataatcataaacattattttgatagagagggaaatatacatgtctaaagcttatgaacaatcaggtgttgatattcatgcaggttatgaagcggtagaaagaatgtctagtcatgttcaacgtacaatgcgtaaagaagtacttggcggattaggtggatttggtgcgacttttgatttatcccagcttaatatgaaagcgccagtattagtctctggtacagatggtgtaggaacaaaattaaagcttgccattgataataataagcatgacacgattggtattgatgcagttgccatgtgtgtaaatgatattcttacaacgggcgcagaaccgctatattttttagattatatagcaacaaataaagttgttccggaagtgatagagcaaattgtaaaaggtgtgagtgatggttgtgaagctactcatactgctcttattggtggagaaacagccgagatgggtgaaatgtatcacgaaggagaatatgacttagcaggttttgctgtaggggcagtcgaaaaagatgaatatattgatggatctgaagtagaagagggacaaattatcattggtttagcttctaatggaattcattctaatgggtatagtttagtaagaaagttaattcaagaatccggaattaatttgaatgattcatttgatggaagtacttatcttgatacatttttagctccgactcaattgtatgtgaaacctattttaactttaaaagaaaaagttaaaatcaaaggcatgaatcatattactggtggcggattttatgaaaatatacctagaggcttacctaacgggttagcagctaaaattgatacacaatccttcccaacaccaaaagtatttgaatggttacaacaacaagctgacattgaaacgagtgaaatgtataacgtttttaatatgggcataggctatactgtcattgtaaataaagaagatgtatctaaagcacttgatatcttaaaagaacaagatattgctgcatatcaaataggggaaattgttaaaagtaatgatgcaccgatttatcttgagggggtatagatatgactaaggtggctatatttgcctctggatcaggaagtaacttcgaaaatattgtatctaaagttgataaggggcaccttaataatatagaaattacttctttgtatacagatcatcacgatgcttattgcattgagcgtgcaaaacagttgaaagtgatggttcatattaatgaacctaaagactttgaaaacaaagcagaatatgaacaaaaattaattcaacttcttcatagtgaagaggtggagtggattatcttagcaggttatatgagattagtgggaccagacttattaaatgcttatgaaggtaaaatattgaatattcatccttcattattaccaaagtacaaggggaaagatgcaattggtcaagcatttaatagtggggataaggaaacaggttcaacagttcactatgtagatagtggaatggatacgggagaaataattgaacaacgaaaatgtgatataaaaccggacgatacaaaagaagcgttagaagaacgtgtgaaacaattagaatatgaactttatccaagtgtaatagctaaagttattaaataaggagcatagttaatcatgaaaaaagcaattattagtgtttcaaataaaagtggagtcgtggaatttgctaaatcattaacgcaattagattatgaattatattcaacgggcggtacaaaacgtgctttagaagaagctaatgtaactgttaaatctgtatcagagttgacgcaattccctgaaattatggatggtcgtgtaaaaacgttacatccagcagtacacggtggtattttagcagatcgtaataaacctgaacatttagaacaattatcagaacaacacattgatttaattgatatggttgtggtcaacttatatcctttccaacaaactgtagctaatccagatgtaactgaagatgatgcaattgaaaatatcgatattggtggtccaactatgttacgtgctgcagccaaaaattttaaacatgtaacaaccattgtccatccatctgattataatgaagtcattcaacgaattaaagaacatcgacttgatgaatcataccgtaagtcattaatgattaaagtatttgaacatacaaatgaatatgatcatgcaattgtaagtttcttcaaaggagatagtgaagaattacgatatggtgagaatcctcaacaatcagcacgttttgttcgtacttctaatagtaaacatactattgctggtgcgaaacaattacatggtaaggcattgagttttaataatattaaagatgcagattcagcattagcattagtgaaaaaatttaaagaaccagctgccgttgcagttaaacacatgaatccatgtggtgtaggtattggcactgatattgaaactgcatttaaacatgcgtatgatgcagataatcagtctatctttggtgggatcattgcactcaatagaacagttaccaaagatttagcggaaacgttacattctattttcttagaagttgtcattgcaccaaaatttgataaagaagctttagatattttaaatcaaaagaaaaatattcgcttattagaaattgatatgacaattgataatcgtgaagaagaatttgtttcagtctcaggtggatatttggttcaagataaagataattacgaagtgtctaaagaagaaatgaaggttgttacagacgttgaacctaccgatgctcagtgggaggcaatgcttctaggatggaaagttattccatcagtgaaaagtaatgcaatcattttaagtaataataaacagacagttggaattggtgcaggacaaatgaatagagtaggtgcagctaagattgcattagagcgcgcaattgaaataaatgacaatgtagtaatgatttctgatggcttcttcccaatggatgatactgttgaacttgctgcaaaacatggtattaaagctattattcaaccaggcggttcaattaaagaccaagattcgattgatatggctaacaaacatggtattgctatggttactactggtatgcgtcattttaaacactaatttaaaataattgagagaatagagggagaaaagaaatgaatgttttagttataggtgcaggcggtcgtgaacatgcattagtatcaaaattacatcagtcgccacttattgaaaaactttatgctattcctggaaatgatgcaatgactcatttagctgaaatacacactgaaattgctgaaaccgaccataaggctattttacaatttgttcaccaacatcatatagaatgggtgattattggtccagaacaaccattgatagatggtttatctaataaattgagagacaatcatgttaaagtctttggtcctaataaagaagcagcccaaattgagggttctaaatcttttgctaaaagggtaatggaaaaatatgatattccaactgctgattataaagaaatagacaataaaactgaagcacttaattatgtaaatgattgcgaattacctattgtagtcaaaaaggatgggttagctgctggtaaaggcgtaattattgctaatacacgagatgaagcaattgaagcggtagaagtgctatatccacaagaagatggaaaagttgtctttgaacaatttcttgaaggagaagaattctcattaatgacattcattaatggtgattatgcagttccttttgactgtattgctcaagatcataaacgtgcctatgataatgacgaaggtcctaatactggtgggatgggcgcttattgtcctgtttctcatatttcaaatgacgttttagaacgtacaaacaaagatattgctcaaccaattgctagagcgttaaaagaagagggttatgactattttggtttactttatataggtgcaattttaactaaggaaggtcctaaagttattgaatttaatgcacgatttggtgatccagaagcgcaagtattgttaagtcgtctagaaagtgacttgatggcacaaatcgttgctctagaccgtaaagaacctattcgttttcaatggattgacgattatgtggtaggagtaatgcttgcttcgaaaggctatcctggatcatatgataaaggtgcagaggtttcaggctttgaattaaataaccattatttcgttagtggtttgaaaaaagaaaatgatacatttcttacatccggcggacgagttgtattagccattggaaaaggaaaaactattcaacaagcacaaaaagatgcttatggaaatgtagaaaaaattaagagtgatcaactattttatcgtaaagatattggaaataaagcgctcaaataaactaaaaataataacccatagatgataggcactgaacccttaaaatgggaacttaataaaaacactatgttctaggctgctaattctctgtattttacaggggataagtagcctagtttttgttgaattcgattattattatagtttttaatgtatttttcgacaatatctattacaatatgattagagctattaagctgattattgatgtaaaaagtttcagactttagcgaggaatgaaaactttctatcggggcgttatcggcaggtgttccctttcgggacatacttctgataatgcctttttcttcgcataattgataataagcataagatgtataaacgctgccttgatcactatgtaatatacacccctcaggtatatcgatttgatttaatgtatcattaactaaactttggtcttgtttatcatctattttatacgccacaatttctccgttatatatgtccattatcgaatgtaaatacaacatagagtgaccaaatggtaaataagtaatatcggttgttaatactttcatgggacaactcgctttaaattgtctttgtaataaattgtttgttttataatacggtttacctatccttgtcgtctttttaggtctaactcggcagttcaaatgatgcttctgcataattctctgtactctcttatgattaattggtgatgtataacattgattaatcaatgctgtaatcttacgataaccgtaggtatagtggttagcttcacataattcaatgactttttgtgttacagtatcatttttataggttttgtttttccatcggtaatatgttgatttaggtatgtttaatacgtctagtatcaatttgattgaatagtttccttttaattgatccactaaatctatgactaccgttggtaccacttcctttccaatgccttgtacttttttaaaatatccaattctatatcttttctcttattttctaattttaattgttctacttctgacagctcttctaatcctttaccgtaggtatattgtttaccaacgtgttgtggaaatctataactttccccatttcgataccatcgccaccaagttttcacttgtgttctatttctaatatttaattcttccataatttcttttgttgaaaatcctgctgctttcatttcaacagctttatactttgtttctactgaataagcaactcttttcatagaaaaaacacctccgcatgattcattttaatatgaatcatgcggaggtgtttttatatacttcccactaattggggtcagtccagatattcatctatgggttttttataatgttagggtttaatatacgagcaagataaatttactgtatttttgaaactgtttttatctttgaactcaatttttactttagtttgtcttatgttagatatattactctaacatttctgaaacacgagcatcttcaataccagtgattggaaaatattgagataaataaaaagcaataataagtaaagcaattgtcataccaacaaaaagaatatctttgtatgagaaaggtgctttataataataggtacgtgggccatctttaaatccttttgattccatagctactgataattgatgtgcacgacgtatgttttgacttaaaactggaataagtaagtgttttatacgtttaaatccacgataattggaagcatcaatcatttggtaacgcatttttaaagaacgtcttaattggataaatgatgtgaaaataagtggtaccatacgaatagcagccataaatgcataggcgattttaggttttacttttaaatgttgcattaaactatagaaaatcattacaatttgcgatgttaatgcaattaacacaccaaacattgaaacagtaattgttcttaaagataagtgaagacctcttacaatgctctcagtactaatatgaataattccccattcaaataacatatgtgtaccatcaccatataaaatcatgaataatgatgatagcaaggcaaagagaatggttgctgataaaaatgcagcaatgactttaaaagctgtaccattaaaagataataaaaatataaacattaataaagtaatataaatcatgtaatcaaaattatgcacaaaaatgataaaaataaataataaaactccaagaattaatttcgtaataatatttacatcatctacaagtgtatgacgctttttccaacgttcaaacatttgattcacctgccatttctaaaagcttatgattttctacgacaagtcgacgtgttggataacgatgaataatttcagggtcatgcgtcaccattacgatagtttgtccttgttttacacgttcttcaaatagcttaatcaattgaaatgtattatgactatcaagtccaaatgttggctcatctagtaaaacaatttcagcttttgaacttaaagcagttgctacgcttaatcgacgtttttgacctgtagatatttcaaaaggatgatgatgtttaactttttctaaatgtaaaagtttcaaaagatgctcagtttcttctttcgattttgctttatcaagatgattataatgaatattaatttcgtcataaactgaatttgtaataaattgaagttcaggattttggtatacaagatacatattttgagcagcatctttaattttcttcagtaatcgcttctcataaaacattgtaccgttgtatttcactaattgcatcatagattcgagtaaagtagttttaccagctccattttttccagtaattgtaatccattctccaggatgaatatttagttctgaaacttcaaatagtgtatttttactacgaattatttgtccgttttgaaatttaaaaagtgtattggaatattggggagttaaatcttttcgaataggtgcataatcccaagcatgaggatgccatacgccaaattcagtgagtaacgattcacaatgtttgagtatgtattcaggtgtattatcagctataatttctccatcatagttcattaatatgactcgatctacatgatgccaaatatgttccactttatgttctacaattaataccgtttgatcagtccataagtgaattaatcgttgccataagtcagcagttgcttgtacatctaacatagctgtaggttcatctaaaaagagtgtatcagctttctgtaaaatcgtttcaacgatagcaagcttttgtttcatgccaccacttaaattatttacgaaagttgaattatccacatctaaatctacagacgcaagtgcttttttaatttgttcatccatgtcttctcttggcacttgttgattttctaagacgaaagctaattcttcgtaaacttttggcatacaaaattgtgtatctgggtcttgaaaaataacccccgaattaggatcaatgtctagttcatcatatttcatcggtaattctataagattaggaacaataccactaagtacattaagcaatgtgcttttaccagatcctgaaggacctagtaaaagcactttttctttatctttaatttctatatttagattatcgaaaatttttcgatcaccatttggatattttagacgtaaatttttgacttttaacacaatcatttccccttataagttgtcgtaatctttttgagaggcaggacggaataatttagttactccagtttgatctaaggcttttacaattaaataagagagtataccagacagtacaataccactaatagcacggaaaatgatgaaaagtagtaagttccaacccgcaacttcgtttagatagccataaaaataatctacagggaaagatactaatgctgttactaaaccagctaacattgctaccattaaagaacgtgatttgtatttaaagatagcaaacacaacttcacatgctagaccttgtaaaattgcatatactatagtaggaatatcaaatttccccataacaatagtttcacctgcaccagcagcaaattcagcaattaatgcaatacctggtttaggaataattaagtaagctacaatagcagccataaaccaaataccgtatgtaagttgctctagatgtataccagctacttgagctaaattatatggcaaccaccataagttataaatgattgcaaaaataacagcaatcagcaccgtaactagaatttctgaaagttttaaacctttagacataaaatagttcctcctaaaaaaacgcacaacccttcgtagaaaagttgtgcgtaaatttaaataaaaatgctattgattattaaaaacatgatttatttaagttaacactttcctacgctagtttttaactagatcaggttcaaagggtttgaggttaagcctcatctcagtgctatacacccctagtgcatttatattttatttattttaaatgtatgacttttaatagtagatgtcaagatgcttttaatctatatttaattaaaaataaattataattaaacagtttacatatttaacaattaaaatgtaattagttctaaaaataatgaaagaaagtaggatagatttatttccaactcagccatcgatagccaatatattaaaaatacctgagacagcttgtatgtctcaggcttattcattaaatattcttaatgatgacataaataagaaaattagtctaatgtattttgaacatcttgtttagtttgttcaatatcatcagttttttcttctttttgttcttttaatttttcttcatattcttttgctttttttgcatcttcatgtgtcataggacaactctcctttttcatagattactttacaaaattaatatacccaattaataaaagaataaacttcatctcagtctagagaagtattttattttttattaaagacaagaatagaaagttcatatataattaattttgaggtgaactgtatgtcttttcttaagaaacacgccgagattatctatagttacttgatcggtatcgtttcactcttcacaggtctcattatcttaatcaatttgcctttaatccataaactaaaagataaagataaaattgatttaaaaatacataatatatgggactttcttaatgcattttttagtgaaataattagagtgatgagtagattcataggcaactttccagttgtaagtgcagtcataattattctatttggtattctagtcatattgattggatatacgttatttagaacaaccaaatacgattacgacatctcaattttctttttagttattggtattttatacttcctcattacaattacattgatgactcaagtatatggtttttgggcaattatattcattattccatttgtgattcatacaggatatattgtttataaagatgaattgtatcaagaaaatagaaaagttcattatttatggattattatttcatatggaataagttacttgattactcaactgtcattgtatggcaaaatcgatgcaaatgagattgagcctattgatattttaagtgtaaatacattcttcatcattatgtggttattagctcaagcggcaatttggaatttcttattcttacgccgtgcgttacctttaacaaaagaagaattaggggaagaagagcctgaattatcaagaactcaaaaaggaaacgtttcgactcaatcaaaagttcattttaaacaacttcaagataaaacatcagaatatgcacgtaagacaagaagaagtgtagatttagataaaattagatctaaacgcgataaatttaaaagtaaatttaaaaatatcgtagatatagaagaagatgatattcctaagtggatgagacgtcctaaatggattaaaccagcatatgtggaaattttctgtggttttatcttattcttatttacatttatagaatttaataatagaaatgctctatttgtatctggagaatgggaattatcacaaactcaatacgtgattgaatggattacactgttaatattactctttattattatcatttacattgcgacgacatttactcattttttaagaggcaaattttactatttacagttgtttatgattagtattctattcttcaaattgcttactgaatttattaatataatgattcatggtctattactttcaatatttattacacctacattaattattatgttaatacctgtaattatagcattttcgttgcaattaaaagaaaaaccataatctgagtaagggagtggaacagaattcatttttgaattcagtgttccacttctttttttaatttaatatttaggtgaagaattttaaatttgttaaaatagtagagtagattacaatagattcgttacaaaattaaaataggagaaattaaaatgaaaatagcaactttaaataaaggcaaagaaactaaatatttaaatcaatatcctttagttgaagaagaagatatttttcaacacgatcatttaaaagaaggtgacttgtttaatatagttactgaaaataaccaatatattgcaacagcttatgtaggacgtcaacataaaggattaggatgggtaatcacatatagccaagaagaagatatcaatattactttctttgaaaatttatttaaaaaagcgctagaagaaagagagtattactataatatagaaggaactaatgcttttagactatttaacgctgagggagatggcgttggaggtttaactattgataattacaatggacatctacttattcaatggtattcaaaaggaatttacaagtttcgttatataattattgaagcaataaaaaaagtatttaaatttgaatcagtttttgaaaaaatgcgctttaaagatacggagtatacaggaggacatgtacttggaaaaactccggaatttccaatagttattgaagaaaattttacattttacaatgttgatttaaacgatggattaatgacaggaatatttttagatcaaaaagaagttcgtaaaaaattacgtgattattttgccgaaaatagaagtattttaaatttatttagttatacgggcgcgttttcagtggtagcatctaaaaatgctaaagttacaacaagtgtagatttagctaatcgttctcgtacattaactgaagaaaattttgggttaaatggtgtagaccctaaaagtcaatatatctatgtcatggatacatttgatttttataattatgcagcacgtcatggaaaacaatatgacacaatagtcattgatccacctagttttgcgcgtaataaaaagaaaactttttcagtgcaaaaaaattatgatgatttaattaatggtgctttagatgttttagcaccagatggtacattgcttctatgtacaaattcaagtgctttttctttaaaagcatttaaaaatgtaattaagaaaacattggaacaagctaacgtagaatatgaaatagaagaagtcatgggattaccaaaagactttaaaacacatccacattataaactttctaaatatttaaaagctgtattcataaatattaagcattaaagtactgaaatagggtattaaatgtatattgaaaatattatgaaaaacgaaaggtgagtcagtaagtgggtattattaataaaattacaaatggagttactgataaagttggtaaaaaggtcttagatatagaagaaattaacgaaaaagatatcttacctaaaaatgaagaagaaattgcacaacgtagagaaaaagctaaagctgttgttaagaaaaaatctttattatcttcagggatgagtgttgtgccaattccaggattagactttggtgtagatatcaaattgatgaaagatattattgaagatattaataaaatttatggtcttgatcaaaaacaagtcaattctcttggtgaagatgttaaagaacgtattttatcagcagcagcaattcaaggtagttcaatgattggtgaaaaagtaactagtggtgctttgaaattaattattagagatgttgctaagcgtacagcagcaaaacaaacaaaatggttcccaatagtgggacaagctgtttcagcttcaattagttactactttatgaataaattaggtcaagatcatatagaaaaatgtgaaaaagttttacgtgatattatttaattttttaaaaatgtagtataataaaagggaagaagtttatatataatattagaaaattgactaacataacgctatacctattataagtaatcaaactttgtttgattacttatataatgactgctactttattaacataagtgtatttttctataataattcaattatataagaattgaattcagttatatattttggtagtgttagggtataaatttttatgttagataataagaaaattgattttctaacttacggaggagaaatagattatggaacaaaaatcatatgtaattgttgacgaaactggaattcatgcacgtccagctacaatgttagtgcaaactgcatctaaatttgattcagatattcaattagaatataacggtaaaaaagtaaatttaaaatcaattatgggcgttatgagtttaggtgtaggtaaagatgctgaaatcactatctatgctgatggaagcgatgaacaagatgcaattcaagctatcagtgaagttttatcaaaagaaggtttaacagagtaattatgtctaaattaattaaaggtattgcagcttctgatggagttgcaattgccaaagcatatttactagtagaacctgatttatcatttacgaatgagaacattactgatactgatgctgaaattaaaaagttcagaaatgctttagaagcttccaaaattgaattaacaaaaattagaaataatgctgaaaaatcattaggtgcagataaagctgctatttttgatgcacatttacttgtacttgatgatccagagttaattcagccaattgaagataaaattgcgaatgagaaagtcaatgctccagaagcactaaatgaagttacgactcaattcattactatttttgaatctatggataatgaatatatgagagaacgtgcagcagatattcgtgacgtttctaagcgtgtacttgctcatcttttaggcgtggacttaccaaatcctagtatgattgatgaaagtgtagttattataggaaatgatttaacaccatctgatactgcacaattaaacaaagagtttgttcaaggttttgttacaaatattggtggacgtacaagtcattctgcaattatgagccgttcattagaaattgcagctgtggtgggtactaaatcgattactcatgaagtaaaacaaggagatatggttattgttgacggtattactggtgacgttatcatagatccgactgaagatgaactcattgcttatcaaaataaacgtgagcgtttctttgaagataaaaaagaattacaaaaacttcgtgatgctgaaactgtaactgttgacggtgaacatgcagaattagctgctaatattggtacacctgatgatttatatggtgttatggaaaatggcgctgaaggaattggtctttatagaactgaatttttatatatgggtagagatcaaatgccaactgaagacgaacaatttgaagcgtataaaaaagtgttagaaactatgaaagataaacgcgttgttgtacgtactttagatattggtggagataaagaattaccatatttaaatttacctaaagaaatgaatccattcttaggttatcgtgcaattcgtttgtgcttagatcaacaagatatcttcagaacacaattacgtgcgttattacgcgcatctgcttatggtaaattaaatattatgttcccaatggtagccactattaaagagtttagagatgctaaagctattcttttagaagaaaaagataaattaactagcgaaggacaagaagttgctgatgatatcgaagtaggtatcatggtagagattccttctactgctgcgttagctgatatctttgctaaagaagtagatttctttagtataggaactaatgacttaattcaatatactatggcagctgaccgtatgtctgaacgtgtttcatatttatatcaaccatataacccagcaattttacgtttagttaaacaggtcattgaagcttctcataaagaaggtaaatggactggtatgtgtggtgaaatggctggcgatgaaacagcaattccattattattaggtttaggattagatgagttctctatgagtgcaacctctattcttaaagctagaagacaaattaatggtttaagtaaaaatgaaatggcggaattagcaaatcgtgccattaattgtgcaacacaagatgaagttaaagaacttgttcatcgcatttctaaataatattaaaaatacctgagacaacttatgatgtctcaggttctttttttatgtattacagttggatatcaaatattctgttgattttttctaaatctacatgatacataggctcctcatttaataagataaatggtgtagagaatgcatcatattctaacatttcattacgataagaaggatgcttaatatttttttcaataaaattaatatgatgttccgttaaataattttttataaaattacaaggtggacaatcatcttgtgtatagataattattttagacataaatcatattctccttttaattatacttttcttactatatataaggtaattaaaaaatgcaaattttgaattttatgtgaattccatttaaattatctattaaaaagtaaacaaaaaaattttagttactaatgtttaggtatataatttaaatctataggattaaattttaaattatagaaaaggtggttaagtatgaattctgtcgaaattagtcgttttttgacagggatgacattaggcgttcatattatttttgctactattggagtaggaatgccattaatgtttgcaatcgcagagtttttagggatcaaaaagaaagatcctaaatatatagcattagcaaaacgttggtcaaaagggtatacgattacagttgcagttggggttgtaactggaacaattattggattacaactttcacttgtttggcctacgtttatgaaaatgggtggccatgttatcgcgcttcctcttttcatggaaacatttgctttcttctttgaagcaatctttttaagtatttatctgtatacatggaatcgttttaaaaatcaatggatacattttttaattagtttacctgttattattggtggttcattctcagcgttctttattacttcagtgaactcatttatgaatactccagcaggttttgaaatgaaaaaaggtaaaatggtgaatgttcaaccatttgaagcaatgttcaattcttcatttttagttagagcatttcatgttgttgcaacagctggtatgacgatggcgtttattttggcagcaattgctgcatttaaattattgaaaaataaatatagtgaagatgcgccatatcataaaaaagcgttaaaaatgactatgattcttggatttattcaaacattattatcaatgttagcgggagatttgtctgctaagtttcttcataaagtacaaccagaaaaattagctgcatatgagtggcattttgatacacattccaaagcagatttagtattttttggtgtcttaaatgaaaacactcaagaagtttcaggagctataaaaattcctggattactgagctttttagctgataataatattaatactaaagtaaaaggtttaaatgaatttcctaaaaatgatttacctccattaatcgttcattatttctttgatttaatggtagctatgggaatcttttgttttatcgtatcaggcatttttatattagcattattgataaaaaaactacgtcctattataactaaaaaagtaatgctttatgcagtacttttaacaggacctgcttcaatgcttgctatagagtttggttggttcttaactgaaatgggacgtcaaccatggattgttagaggttacatgcgtgttagccaagctgctacacaggcaggaggaattacattagtaacaattttattcggtttactttattttgtacttctctttacatctgcttatgtattattgagaatgtttagaaataaaccagctcgcgaggatattgataaagtgattggaggtcaagaataatggattatactggcataggtattacagtattatggactttcctattttgttatattatcgtagcgtctattgattttggtgctggatttttaactttgcatacaaaattaacgggagaagaaaaaaagattaatcatcttatagaaagatatttaaatcctgtatgggaagtaacaaatgtattttttgtatttttctttgtaggttttgtcggatttttcccagattcagctctttatttagggacagtgttattagttcctggttcaatcgctttaattcttatttctattagaagtagtttttatgcttttgaacattatggacaagataataaactgccttggatatttttatatggtattactgggcttttaatacccgcagcactcgcaactgtattgactatctcagaaggcggatacattaatgaacaaggcaatcattttgatttggattgggtacaattactattaagtccttttgcatggtcagttgtatttttagcaattgtaagtgtgttatatatatcatcagggtttttaacatattacgcttctaaagcaaaagataaagtggcttataaatttatgcgtcaatggtttatgttctggggtccaccgatgattattatttcattatttgtattcttatcattaagaatacaaaactctaatcacttttataatgcaattacgcattattggtggatgtttgcaattagttttattttcttcttaattgcaggaattttaaatatgattaaaaagtatcatggtttagcatttattatggtgattttacaaatggctttcgctttttacggctacggtatgagtaagttaccttatattctttatccatatattaaaatttcagattcaggtgtaaactcatcaatgggcttagcattaacgattgtctttattttaggtttacttttattacttccatcgttaatattgttattgagattattcgtttttgataaacaatatgtggaaggtaaaaagtaatttaaattaagagaggagctgaaatgagagtgatttatatttatagaactttgaataagtttctagtatataaatgaacttatcattttagctcttattttttagatgggagttccagaattcatggagaaagagtatgtagtaataggattaggtcgttttggaggaagtattgtaagagagttaaatgctttagatatggatgttatggctattgatagagatgaagctcgagtaaatgaatatagtgaaattgcgacacatgctgttgtagctgacactacagatgaagcggtaatgaaaagtttaggtatacgaaattttgaccatgtcattgtggcaataggtgagaatattcaatctagtacattaacaactttaatattgaaagaattaggtgttaaaaaagttacggccaaagcacaaaacgattatcatgcaaagattttgaataaaattggtgctgatactgtggtacatccggaaagagatatgggtcgtcgtattgcacataatgtagcaagtgcaagtgtactagactaccttgaacttgcagatgagcattcattagtagagttaaaagtaagtgaaaaattgactggtcaaacaatcagagatttagatattcgagcacaattcggtattaatattattgcaataaaaagaggacgagaaatcattgtatcaccagatccaaacatgaatattgaaattggagatattatgataatgatcggccacgataatgatttaaatcgttttgagaaaaaaatagtaagatagtaaaacacacggtatttcttaagaaataccgtgtgtttttattcttcatttactttcataattactggtaaaatcattggacgacgagctgttttttcatataaatacggctgtaacgtttcaatgattgaagatttaatttgatgccattgaatatcatcatttgaatttagttttgaaataacatccgttttaatttttcgttgtgcatcataaattaattggccagattcacgcatataaacaaaaccacgtgaaataatatctggacctgaaagaagtttatttgtattaaaatcaatacttactacaacaataaccaatccttcttcagataataatttacgatcccgaatgacaacattaccaatatcaccgatgccacttccatcaactaatacattaccagatggaattcgaccagctttacgcgcagaatcgtgtgttaaagctaagacatcaccaatatcaaaaataaagacattttcttctttaacaccacaatcaatacctgtttgaccatgagcttttagcatgcgatactcaccatgaataggtaagaagtatttaggttgaattaaacgaagcattaactgctggtcgccttgggaaccatgtcctgatgtatgaatgttagaaatcttactgtgaataacatcagcaccagctttatataatgcgttaattgtacgattgatgcttttagtattccctggaataggagaagaactgaatactacagtatcatcaggtataattttaatttgtttgtgtgtaccattagcgatacgcgaaagtgcagccattggttcaccttgagagccagtgcataaaataagtaactcgtgtttaggaatattattaattttgttaggctcaacaaatgtttcggggggtgctttgatataaccaagctccataccaatcttaatattattttccattgaacgaccaaaagttacaattttacgattatatttaattgctgcttccaccgcttgttgaacacgatagatgtttgatgcaaaggttgcgaaaataatacgacctttacagttacggaaaattttatcgacattttgtccaacttcacgttcacttaatgtgaaatcaggaactagcgcatttgtagagtcagataacaagcataatacgccttctttaccaagctctgccatttttgcgatatttgcaggcgcaccaacaggggtaaaatcaaatttgaagtcaccagtatggacaattttaccttcaggtgtgtcaacaacaacaccatatgcttccgggatactatgcgtagttaagtaaaaagaaatttcaaaatgtttagattttataacactatcttctgtaatttcatttaaactagcattacgcagtaaattgtgttcttctaatttattgcgtattaaacctaaagctaaagggccaccataaataggcacattaatttgctttaataggtagggcacaccacctatatggtcttcatgtccatgagtaataaataaaccaacaattttatcttgattttgttctaagtaggtataatcaggaataacgtagtctatacctaataaattatcatcagggaacttaattccagcatcgatgataacaatttcatctttatactccacagcataagtgtttttaccaacctcacctaagccgcctagagcatatacacctacttcattagaatgtaattgtttcattattgagcgttctccacattaaagtgatcagaatgttctttttcatattctaaatgtgcgccctctaatttagtaataaactcgatattataattgcgatcttttaaataacgtcttacttgttcttcagtttcaccttcaacataaattgtatttgtgttctcacgaacaattacttcgtctttattatgttgaaaaaatactttaaatactgccatgatatatatttcctcctaaataaatgtttatttattgtcttatgagcacaagtagaaaataaataaaatatacatgtttatttattttcacatctaacgtgaatgccacataacaggtattttaaatttttaatataaaataatatttattttactgtgcttaaaggcaaatcatacatgtcgttcatttttgaaagatagtaatttactatgatttcagttaacttttattttaccttatgtatcagaataaataaagcagtttatatgtagtaaaagtagtaggaaattgaataaaaaaagaaaagcctaacacatttattacaataatgtaaaaatgcattaggcttgaatattaaacttcaactgagtctggtaatggagtaagaggatgatctttatcgatataatcgtagaacataatgccgtttaaatgatcaatttcatgttgaaatacaattgctggataaccttttaaacgtaatttaacttcattaccatcaatatcataagctttaattgttgttctataatgacggtgaactaaaccaggtatattttcatctacgcttaaacacccctcaccagtaggtaaataagcgtgttggacactatgactaattactttaggattgactaacatatagtcgtaagatttaccttccccgtcgtcgggtaaatacacagctatcattttttttgagatattaatttgtggtgcagctaaacctactccagagcgtagaccgtattttttagcaatttcatcatcttgactattaattaaaaattcacgcatatcacgcaaagtatttttatcttcttcagaaagaggtaaattcacgtcttttgctttttcgcgtaacgtaggatgtccatctctaataatatctttcattgttaacatgttatacaccttccttatataatataaaatataacagataatatacatttacgtacattatatagtttcatttgatttataaactatctttatataatattacaatcgaaacactatgaggaggaatgacattaatgaaattacgtaaaaccatagttgttgcagctgcctctacacttttattagctggttgtacaactgataaaaaagaggtaaaagcttatgacgagaatgttcaaaaagcatttgataaagaacaatctataaatgaggttagtaaaaaactaaattcacttgaagaaaagaaacaaggtttgtataaaaaagcaaatagcaatgacagtaatacacgtagtaaagcagctgacgatgtacttgataatattgataaacgagaaaaaacctttgataaggaagtttcaattttaaaaaattccgaaaagcaatttaaaaaaggcgattctcatattaacgatattaaaaatgataataaaagaaaagaagttaaacaacttgacgatgctataaaaaacaaatataaaacacatgacgactatgctaaagcttatagaaatgtattaagtaaagaaaaagatttatttgaattagtcaaacaagatggagtaacgcaatctcaagtagacgaaaaaaacaatgcgcttaataaagctcaagaaaactttaagaaaaaattccaggcttatgctaaggcaatgaatacagttaataaagaaaaacaagacgtcgatcatttaatctcttaacatcactaatacagtgttaattgttacattgatacagtttctcagactgtatctttttttagtaatacagaactttatgaaaatgtttaacagtctaaaataattgtggtacactatgagtggataaaatgaatttctattatatgggaaaggtatggtgaattgaatggctcctaagttacaagcccaattcgatgcagtaaaagtattaaatgatactcagtcgaaatttgaaatggttcaaattttggacgtagatggtaatgtcgtaaatgaagacttagtacctgatttaactgatgaacaattagtagaattaatggaaagaatggtgtggacacgtattcttgaccaacgttctatttctttaaatagacaaggtcgtttaggtttctatgctccaacagcaggacaagaagcatctcaattagcttctcaatatgctttagaaaaagaagacttcattttacctggttaccgtgatgtaccacaacttatttggcacggtttaccgttaactgatgctttcttattctcaagaggtcactttaaaggtaaccaattccctgaaggcgtaaacgcattcagtccacaaatcattatcggtgcacaatatatccaaacagctggtgtggcattcggtattaaaaaacgtggtaaaaaagcagttgctatcacttacactggtgatggtggttcttcacaaggtgatttctacgaaggtattaactttgcttctgcttataaagcaccagcaatctttgttatccaaaacaataactatgctatttctactccacgtagtaaacaaacagctgctactacattagctcaaaaagcaattgcagtaggtatccctggtatccaagttgatggtatggatgcattagctgtatatcaagctactaaagaagctcgtgatcgcgcaattaatggtgaaggtccaacattaatcgaaactatgacttatcgttatggtccacatacaatggctggagatgatccaactcgttacagaacttcagatgaagatgcagagtgggagaaaaaagacccgttagttcgtttcagaaaattcttagaaaataaaggattatggagcgaagagaaagaaaacgaagttattgaacgtgctaaagacgacatcaagaaagcaattaaagaggctgacaatactccaaaacaaactgttcttgatttaatggatatcatgtatgaagatatgcctcaaaatttagctgaacaatatgaaatttacaaagagaaggagtcgaaataagccatggcacaaatgacaatggttcaagcgattaacaatgcgcttaaaactgaattgcaaaatgacgaaaacgttttaattttcggtgaagacgttggtgttaacggcggtgtattccgtgttactgaaggtttacaaaaagaattcggtgaagaccgtgtattcgacacaccattagctgaatctggtattggtggtttagctcttggtttaactgtagaaggtttccgtcctgtaatggaaattcaattcttaggattcgtatttgaagtgtttgacgaagttgctggtcaaatcgctcgtacgcgtttccgttcaggtggttctaaaactgctcctgtaacaattcgtacaccatttggtggtggggtacacactccagaattacacgcagataacttagaaggtattttagctcaatcaccaggtattaaagtagttattccatctggtccttatgatgctaaaggtttattactttcatcaattagatcaaacgatccagttgtatatttagagcacatgaaattatatcgttcattccgtgaagaagttcctgaagaagaatatacaattgaaattggtaaagcaaatgtcaaaaaagaaggtaatgacattacattaattgcatacggtgcaatggtacaagaatctgaaaaagctgcagaagaacttgaaaaagaaggttactctgtagaagttatcgatttacgtacagttcaaccaatcgatattgatacattagttgcatcagttgaaaaaactggtcgtgcagtagttgttcaagaagctcaacgtcaagctggtgttggtgctactgtagcagctgaattagctgaacgtgctattctttcattagaagctccaattgcacgtgttgctgctgctgatactgtatatccatttactcaagctgaaaacgtttggttaccaaataaaaatgatattattgaacaagctaaagctactttagaattctaatagtatatacaaaacagtaagctatatatgaatctatatatttaaaataagtattttctatttattttatgtatatataattaattgtaaactagagacgtaggacaaaatgataaagtgttaacagacacgacatattattctgtccttcctctatgttataaatttatttaaataataaatatttaaatcttaggaggataagaacgtggcatttgaatttagactacccgacattggtgaaggtatccacgaaggtgaaatcgttaagtggtttgtttcagccggagatacaattgaagaggatgacgtattagcagaggttcaaaatgataaatctgtagtagaaatcccatctcctgtaagcggtacaattgaagaagtagtagttgaagaaggcactgtagcagttgtaggtgatgtcattgttaaaattgacgcaccagatgcagaagaaatgcaatttaaaggtcatgatgatgacgatgcttcatctaaagaagaagaacctgcaaaagaagaagctaaaactgaagaaactccagcagcttcaacatcacaagatgaaaaagtagacgaaaatagacgaattaaagcaatgccatctgtacgtaaatatgcacgtgaaaaaggcgtgaacattaaagcagtttctggttcaggtaaaaatggacgtattactaaagaagacatcgataaccacttaaatggtggcggtgctcaagcagcaacagcttcaaatgaaagtgcagctgcttcaacatcagaagatacttctgcagttcaaactcaatcagtacctgaaggagacttccctgaaactacagaaaaaatccctgctatgcgtaaagcaattgctaaagcaatggttaactcaaaacacactgctccacacgtaacattaatggatgaaattgatgttcaagaattatgggatcaccgtaaaaaattcaaagaagttgcagctgaacaaggtattaaattaacattcttaccatatgttgttaaagcgcttgtttctgcacttaaaaaatacccagcacttaatacatcatttaatgaagaagctggtgaaattgtacacaaacattactggaatatcggtatcgctgcagatactgaaagaggtttattagtacctgtagttaaaaatgcagatcgtaaatctattttccaaatctcagatgaaatcaatgaattagctgttaaagctcgtgatggtaaattaacatctcaagaaatgagcggtgctacatgtacaattagtaacatcggttcagctggtggacaatggttcactccagttatcaatcacccagaagtagctattttaggtattggacgtattgctcaaaaacctattgttaaagatggtgaaattgtagcagctccagtattagcattatcattaagctttgaccacagacaaattgatggtgcaactggtcaaaatgctatgaatcatatcaaacgcttattaaataatccagaattattattaatggaggggtaaaacatggtagttggagatttcccaattgaaacagatactattgtaatcggagcaggtcctggtggatatgttgctgcaattcgtgcagctcaattagggcaaaaagttactattgttgaaaaaggtgacttaggtggtgtgtgcttaaacgttggatgtattccttcaaaagcgttattacatgcttctcatcgtttcgtagaagctcaacactctgaaaatttagggattatagctgaaagcgtatcacttaaatttgataaagttcaagaatttaaacaatcagttgttaataaattaactggcggtgttgaaggtttattaaaaggtaataaagttgacatcgttcgtggtgaagcttatttcgtagatgaaaatagtttacgtgttatggatgagaaaagtgctcaaacgtataacttcaaaaatgctattattgcaactggttcaagaccaattgaaattcctaattttgaatttggtaaacgcgttatcgattcaacaggcgctttaaacttacaagaagttcctggtaaattagtagttgtcggtggcggttatattggttcagaacttggtactgcctttgctaacttcggttctgaagttacaattttagaaggtgctaaagaaattcttggcggtttcgaaaaacaaatggttcaacctgttaaaaaaggtatgaaagaaaaaggcgttgaaattatcactgaagctatggctaaaaacgctgaagaaactgaaaacggtgttaaagttacttacgaagctaaaggtgaagaaaaaacaattgaagctgattatgtattagtaactgtaggtcgtcgtccaaatacagacgaattaggcttagaagaattaggtcttaaatttgctgatcgtggattattagaagtagacaaacaaagtcgtacttctattaaaaacatctacgcaattggtgatatcgtacctggtttaccacttgcacacaaagcaagttatgaaggtaaagtagctgcagaagtaatctcaggtcaagcatcagaagttgattacattggtatgcctgctgtatgcttcactgaaccagaattagctcaagttggctatactgaagctcaagctaaagaagaaggtttagatttcaaagcatctaaattcccttatgctgctaacggacgtgctttatcattagatgatacaactggtttcgttaaattaattacattaaaagaagatgacacagttattggtgctcaagtagcaggtaatggtgcttctgatattatttctgaattaggtttagcaatcgaagcaggcatgaatgctgaagatatcgcattaactgttcatgctcacccaacattaggtgaaatgactatggaagttgctgaaaaagctattggattaccaatccatactatgtaatttccttttgaaataattgtgaattaaatcgacgtatttaattgaaataattgaaataaccatttacggtgggactatgatttttataaggaatctagttccacctttttttatagaaataagtttatattttggagggtaactatggaatatcaatatccactcgatttagattggtctaatgatgaaatggttgaagttattaaattttttaatcaaatcgaaaactattatgaaaagtctataataggtactgagttaatggaacaatataaaaaatttaaacaaattgtgccaagtaaagctgaagaaaaacaaatttttaaagaatttgaagaaaaaagtggctataatagctataaagtaatccaagaagttaaaaagcatcctgatcgagaaaattttagtaaacattaagattgctaattcaatctcaattttttaatatacctattgaatttaaagctgtattttgttatttttattaagcattaaacaaaatgtttgataatagtaaacaatatacagcttttttaggtggttagttatgcagattggatataaattaaaaaatttaagacgtcaaaaaaatcttactcaagaagagttagcggaacgaactgatttatcaaaaggatatatttcacaaattgaaagtgaatatgcgtctccaagtatggaaacatttttaaatatattagaagtattaggtactacaccaagtgatttttttaaagaaaaagcgaaagagaaagtattatataaaaaaagtgaacgaactatttatgatgaatatgacagaggatatattttaaattgggttgtacctagttcaaatgaatatgaaatggaacctcttatattaacaattaagcctggatcatcgtacaaatcttttgaaccttctgaatctgatacctttatttattgtttagagggatgtgtaatacttacgttaggtaaggagcgctatcaagcttatgagggagatgtactttattttagagcaaatgaattacatcaattacataatcattcagaaaatgaagttaaaattctaattgtagcaacagcatcatatttgtaaaggaggaaatggattggaatcactattatcttttaaaaaagttactaagaaatttaatgatacaacaatattaaataatatgaacttagatattgaatcgggatatttttatacgttacttggtccctcaggttgtggtaaaactacgattttaaagcttattgcaggatttgaacaacctaatgaaggtcaaattatttataaaaatcagtctatcgaaaaattacctgcaaataaacgtaaagtaaatacagtatttcaagattatgctttatttcctcatttaaatgtatatgagaatattgcttttggtttaagactaaaaaagttttctaaacaagagattgataaggaagttaaagaagcattaaaacttgttaagctcacaggttatgaacaacgtcatattgatgaaatgagtgggggacaaaaacaaagagtcgctattgccagagctattgtaaataaacctgaaattttattattagatgaatctctttcggcactagatttaaaattacgtactgaaatgcaatatgaacttcgtgagttacaaaaaagattaggcatcacttttatttttgttactcatgatcaagaagaagcattggcacttagtgattatatttttgtgatgaaagatggtgagatacaacaatttggtacaccaacagatatttatgatgaaccagtgaatcgattcgtggctgattttattggagaatctaatattgttgatggcacaatggttaaagattttgtagtgaatatatatggtcaggattttgaatgtgttgatgctcggattccatctgggaaaaaaattgaagtagtgattcgtccagaggatatttctttagttgaatcgacacaaggtttattcactgcaactgtcgattcaatgctttttagaggtgtacattacgaaatttgttgtattgatgaaaaagggtatgaatgggttattcaatctactaaaaagaccacaataggaagtcaggtaggtttgttttttgaacctgaagctattcatattatggttcctggagaaactgaagaagaatttgataaacgtattgaaagttacgaggatattgaacatgcgtaatttaaataaatttctcatcattccatatttattatggatgattatttttattattattcctgtgctattacttgtatatttttcatttatcgatataaatggtcactttagttttacaaattatcgccaagttttttcaatgaaatatttaaaaatgatgtgggattctattttttatgcgacacttataacgatcattacactaattataagttatcctgcagcctattttattagatcttcaaaattccaaaatatttggttacttatattaatcatacccacatggattaatttattgttaaaaacgtatgcttttattggaattttaagtcacgaaggtatgattaataaaatgttaggtataatgcatattggtccactaaatttgttgtttacatcaggtgcgtttttacttgttgcaagttatatttatataccatttatgattttgcctatttttaatagcatgaaatcaattcctaataatttattacaagcttcaagtgatttaggtgcaaatacatttactacttttcgtaaagtcatacttcctttgactaaagaaggtgtgatgacaggtgttcaagttacatttataccagcactatcattatttatgattactagattgatagctggaaataaagtgattaatattggtacgtctattgaggaacaatttttagttattcaaaactacggaatgggttcgacaatagctatctttttaattgtatttatggcctttatcttaattattactaaatctaaagaaacaaatggaagagggtgaattaaatgaaatggtacggaaaactttatataggaatattacttgttgtattataccttcctatttttttcttaatgttttattcgtttaattcagctggaaatatggtacattttgaacattttacattagaacattatcaaactttatttcaagatgatcatttaatgtctgtaatattcaatacaatagcagttgcattgctatccgcagcagtatctactattataggaacatttggagcaatatcaatttattatttgcgaaataagaagtttaaattgacattacttacattaaataatgtactaatgatttcatctgatgttgtcataggtgcctcatttttaattatgttcacagctttaggtcatatatttggattaggattaggatttggaacagtattagcatcgcatattgcattctgtatacctatagtagtcattcttgtgctaccacagctatatgaaatgaatcataacatgttaaatgcagctcgtgatttaggcgctacagaatctcaagtactcggacgtatacttttaccaaacttaatgcctgctattattggtggtttttttatggcacttacctattctctagatgattttactgtaagtttttttgtgacaggtaatggatttagtgtcttatcagtagaggtgtatgccatggctcgaaaaggtatcagtatggaaataaatgctatttcaacaatcttatttttagctattgtgctaggtattattggatactatgcacttcaaaatacattaaaacgtagaagtgctaaaagaggtgcaatagaatgaaacaattttttcagttaattatcggtgccattgtagtaggattgatatgtttaggaataagtcattggtttaattctcaagataatacaaaaaatggtaaaaaagtctatgtatataactggggagaatacattgatcccgatttaataaagaaatttgaaaaagagacaggtatacaagttgtttatgaaacgtttgattcgaatgaagccatggaagcaaaaattaaaaatggtggtacacattatgatgttgcatttccaagtgaatatacggttcaaaaattaaaaagagaacatttattagaacctttagatcatcagaaaatacccaatattaaaaatttggattctgattatatgaatatggcttatgatccacataatacctattcactaccctatttttttggaacggtaggtattctatacaataaaaaagcgtatcctaatgaacaatttgatagttggagcgatttatatcagtctaaatacaaaaatgacatattacttgttgacggggctagagaaattatagggttagctttaaataaattgggttatagtttaaatgattccaatcctgttcatattaagcaagcagaacaagacttacaatctcttacacctcaagttagaggggtagtaggcgatgaaattactatgatgcttcaacaaaatgaaggccatattgctgtagtatggagtggtgtagcagcaccacttgttcaagacggaaatacttatgattatgtggttcctaaagaaggttcgaatgtatggtttgataatatggtcattcctaaaactgctcaaaataaagaaggggcataccaatttattaactttttattagatgccaaaaataataaacaaaatacagaatgggttgggtatgctactccgaataaggcagctagaaatttattaccaaataacataaaaaacgatccccgtttttatccaactcaaaaagaacaaaaacatttagaagtttataaagatttaggagagaaaacattaggagaatataacgaaagtttcttgaattttaaaatgtcgttaaaataagtgataattagtagttattttcctataaattagatataataatctgacaagtcaattaaggagttgtaataaatgtcaggagaacgatacacacaaatcaaacgacctgtgagccgtttaactgagaaacttttaggttggattagttggattttcttattaatattaacggttattacaatgtttattgcactcgtatcattcagtaatgatacatctattcaaaatcttgaaaattccatgaataataatcaattaatacaacaaatactagttaacaatagtctaaatacgactcaatttgttatatggttacaaaatggaatttgggcaattatcgtgtactttatcatttgtttattaatttcatttttagctttaatttctatgaatattagaattttatctggaatattatttttaattgcttccattattactttgcctttagtgttattatttattacattaattattccaatcttcttcttcattacagcgattatgatgtttgcaagaagaagtaaattagaaactgttccagcatatggttctacttacgattatcccccttattataatcaaagagatgattatgatgatagatattattatgaagaagaacctactcaatataatgatgaagaagagtacatagaaccacctcgtaagactaaaaaatcagaacgtcgtactcgtcgtaaaccttcaagtgattataatgaaagagaacatgattatgaggattatcatcatattaatcaaaataataatgagcaagattttaatgatgatattgaggaagataaatataatcaatatcctaaacgtgctgtaacaagtgaatatcaacaatcttcaaatgatgatgatacttctggcgtgctttcaagacaaagaaagtataaatataaatcaaaaaatagtatgccgaatgaagttaatgatgatgatgaaaatatattcaatgaaaataatgtagaaacagactcatatattgataagaaagaacaaaaagcacaacgtaaaagagaaaaagcggaattacgtgctaagaaaaaagaaaaacgtaaagcttataatcaacgtatgaaagaaaaaagaaagaatcagccaagtgctgttaatcaacgtcgaatgaattatgaagaacgtaagcaaattttaaataaagaagaaaacaaagagaaacactcggttgatcaggaataattgaaggttattagttttacgtgtaactcccaagcaatttgaattaaatggcttgggagtttatttatcgtcaataaaaataaaattggataagtatgtaataatagaaagatataaattaaaataaaatgcatacatcattgaaatgatataatcgcaataatcagttctattggagtatttgtaaaacctacattaatattaaaaattaaatctatactattcatattatgacattgatatgaaagtttaatatagtgtggtttgcaatgatattatggaagttataatgaattaaaagaatacagagaaaaactattgttaagatatcatgttcaataccttaacaatagttttattttatgcaaaaaattctttaaatgtttcgataattaaataaacattaagtaggcttagaataataattaaactccaagaacaacagttaatccagtttttattataaaaagggcccattaattttttgttgcttgttgcaagttgtaaaggaatgagtgaaaacggtaaagcgatacttaaaaatacttgagaaagtactaaaagttgttccattttattttcattacctttaaatacaattaaacaaattataacaggaatgacagctaaacctctagttattaatcgtcttaaccaatttggaattgataatcttaaaaatccttccataacaatttgacctgaaagtgttccagtgattgtagaattttgtccagatgcaagtagtgcaatagcgaataatgtactcatgatactgccaagtactgaccctagaagcggctgagttttaagggcatgatataaatcataaaatcctcctaatttatcagcattaacaccataaaatagtgcagcacctaatataagtaacaagcaatttactataaaagcgatgcttaattgtatattagaatcaattgttgcatatttaattgcttgtgccttatcgttctcattagttctatcatatttacgtgattgtacaatcgaagaatgtaaatagagattgtgaggcataattgtagcaccaataatccctaaagcaatatacagcacactgtgatttgtaacgatatccttatgaggaataaaaccgttaagaatattaatcactttaggtgacgaaataaatacttcgaataagaaaataattagaacagtaaaaattaatgttccgacaatcgcttcgatttttctgaaaccaaatttcataataaagagtaaaagaaaaacatctaaaacagttataagtgcacctataattaaaggaatattaaacaataaatctagagctattgcacttccgataatttcagcaatatctgtagcgataatagctagttctgctattatccaaaacataattgctaacgggcgatttaaataataacgtgtcatttgtgctaaatccatatctgtagcaatacctaatctcactgtcatgctttgcaaaagcattgcagataaactagaaactaaaataataaaaagaaggatatagccaaattgtgctccaccttgcatagatgtaatccagttacctgggtccatatatcctaccgctactaataatcctggacctaaaaaagctaaaaatttttggcttgcacttttattactattaaagtctactgtattattaatttcatctaagctgcgttgttttttatcactcatataattcattcatacactcctaaaatctttttaattatattaacctaaatatatttttaggtcaacctaaaaatgttgtaaaaaagaatattactgaatttagatggatcttcaagacagtgagtgattaccaataaaataaaaaacacctgagacttctagtaaagtcccaggccgaagaatagtatttattcatataattttaagaattcatcaaatgtttctttaataaaagctaaaaatgtttcatctgattttaatcgttcatcactaggggctaaagtacgtgctataaaaaattctccttttttcacatttttaacacgatcaatagcttgatgtaaatcagtatcacttaaatctttgatatattgtttatcttttttcatgtgatttaaactaatttgataatcatttggaagttgttttaatgcattaaaatgtttgtcaaaaactttaacacgttcttctttattttttccttcatgcattattccatacatgataaataattgatccctaaaaaggccaatttggaagtggggtaacattttataaccacgtttattaggtgcaaaagcgacccaggtatctataggaggattaacacttctacgcgcatgtttagcaacatgtgcataaaatgtttctccagtttgagaagtgaaatactcactaaaataatcgcctaactgatgtaattgaggtctaatatatttatttaaagcttccattcgttcatctaaaccctcaacgtcaaatgctttaaaatctttaggtgtaaatgtgtattgtgtcattgatcttcctcctattttaatagtatgttgagtttattgtagcatatatttcaaagtgataatgatagaatagtaatatacaatatagatagttaatttaaactaataaggtagagtcagtacctagatgttagtcatttaatttttaggattttacccctcgtggttaggagagtgtcatgagattaataaaagtaaaagaaaaaagactataatacaatactaaaaatttgggagaaatctgtagtaaaaacacatgatttttttaaagaagaagatagaatgcaattaaaaaatgaccttctaacttatttaaaatatgtagatgcatatctatgattttatgataaagaagttattggtttttcgggaattaatgatgaaaatttggaaatgttgtttatagatcctaaacattttaataaaggttacggtacaatcatacttcagtcactgattcaagaagataaaatccaatatgtagatgttaataaagataaccaacatgcattgaaattttatattaaaaatggttttaaagcatatagtgaatctcaaaaagacaatcaaggtagagattacccgattttacatttaaaattagcttaatgatcttttatttatttatcttccataattataagatgaatgtacatatttattcatatattttaaatgttttcagtcttttatatcatggatttgataggttgcttttattggcgacctatttttatgcttataaactattcataagagtttaatatatagtgatgaaggtataaaatgatgtataacaattataaaattgatttgatgtataatagtaagcaacaggagatgatagtatgtcgctatatgattttgctaaaggcttagttttagaagcaggaaataaagttagaataatgatgaaggaagaattaaatattgaaacaaaatcaaatccgaatgacttagttacaaatgttgataaagctactgaaaattatatatatgatgcgattacccatagttatccagaacatcgtgttattggggaagaaggacatggtcatgatttaactcatgttgaaggggtcgtatgggtagtggatccaattgatggcacattaaactttgtacatcaaaaagaaaattttgctatctcaattggtatctatcgaaatggtaaaccatacgctggctttgtatatgatgtaatgaaagatgttttatatcatgccaaggtaggtgagggtgcatttgaaaataaacatccattatctacgattgaatctaccaccctaaagaaaagcttaattggtatcaacccaaattgggtaaccaaacctaaaatgggtcctatatttcaagatatagtaaatgatgcaagaagctgtagagcatatggtagtgcagctttagaaattataagtgtagctaaaggacaattggctgcttatatcacacctagattacagccttgggactttgctggtggtcttattgtattaaatgaagttggaggcgtagctagtaacttattaggtgaaccattaaatatttcaagtgcgaattcagtattagtaggaaattcaaatattcataaagaaatattagaaatttatctagcacctaatacggctactttaatagatttacatcaacgctttaaaaaataaaaaatcttatttcaataaaaaaagcttgaggcaaaaatatctcaagctttatatatcttaatggttgattatagccaattgttttcacgatactttttcttaagcgtaaatccggcgccaaacgttgcaatgaaaagaataaatgttaaaatcatcattggaatacttccagcacccacgctgaaactaaagagcactaaaaatataactgctacaatagaaagtatccagaatatacctttagattttggtttttccatccccatccccaccttttagttatcttttgttaatattatgatataataaaaaagttgcaattaaaagtgggaatttactcaagaaaggatattataaaatgactaatagaagagaagatgttcgtaatattgcaattattgctcacgtggaccatggtaaaacaacactagttgacgaattgcttaaacaatctggaatcttcagagaaaatgagcatgttgatgaaagagcaatggactctaatgacttagaaagagaacgtggtattacaattcttgctaaaaatactgcgataaattataaaggtacaagaattaacatcttagatacaccagggcatgctgactttggtggtgaagttgaacgtatcatgaaaatggtagatggtgttgtacttgttgtagatgcctacgaaggtacgatgccacaaacacgtttcgtactaaaaaaagcattagaacaaaatttaaaacctgttgtagtagttaataaaattgataaaccttctgctagaccagaagcggtagtagatgaagtattagatttatttattgaacttgaagcaaatgatgaacaacttgatttcccagttgtttatgcatcagctgtaaatggaacagcgagtcttgatcctgaaaaacaagatgaaaacatgcagtctttatatgaaacaattcttgattacgtgcctgctccaattgataacagtgatgaaccactacaattccaagtagcattattagactataatgattacgttggtcgtattggtattggtcgtgtatttagaggtaaaatgcgtgtcggcgataatgtatcgcttattaaattagatggtacagtgaaaaacttccgtgtaacaaaaatctttggtttctttggtttaaaacgtgaagaaattgaagaagcacaagcgggagatttaattgctgtatcaggaatggaagatatcaacgtaggtgaaacagttacaccacatgatcatcaagaagcgttaccagtattgcgtattgatgaacctacacttgaaatgacattcaaagtaaataattcaccatttgctggtcgtgaaggtgattttgtaactgctcgtcaaatccaagaacggttagatcaacaacttgaaacagatgtatctttaaaagttacaccaacagattctccagatacgtggattgtagctggccgtggagagttgcacttatctattttaattgagaatatgagacgtgaagggtttgaacttcaagtttctaaacctcaagttattttacgtgaaattgatggtgtattaagtgaaccatttgaacgtgttcaatgtgaagttccatctgaaaatgctggagcagtgattgaatcgcttggtgcgcgtaaaggtgaaatgttagacatgttaacaactgataatggattaacacgtttaatctttatggtacctgcacgtggtatgattggatatacaactgaatttatgtctatgacacgtggttatggcattattaatcatacatttgaagaatttagacctcgtgttaaagcacaaattggtggccgtcgtaatggtgcattaatttcaatggatcaaggacaagcaacagcctatgccatcattggtctagaggacagaggtgtaaacttcatggaaccaggtactgaagtttatgaaggtatgattgtaggagaacataaccgtgaaaacgacttaacagttaatattactaaagctaaacatcaaactaacgtacgttcagcaacaaaagatcaaactcaaacaatgaatcgtccaagaattttaacgttagaagaagcattagaatatattaatgatgatgaattggttgaagtaacgcctcaaagtatccgtttaagaaagaaaattttaaataaagctgcacgtgaaaaagaagcgaaacgtgtaaaacaaatgatgcaagatcaataaaactaataaaaagacgcaacatcaaatttgatgttgcgtctttttattattgaaaagtatactataagttttcatttggaaaatggagattaaatttacgattttcatttggtcgttgtctaggtgtgtctaatcgacttttacagtcactacacatgaatgttttaattggattattacgtagacgtttagcttcaactgtacgttcatcaattaaaaccttagtatcacaaataatacattgtacttctcgcaacttaaatcacctcaatacgagttacatatttaaattgatatgaataagcgttctcctcgggattataaacaaagctatctactgaattatcatcgtacaatcgcttaccatctttagcaaattggaaaaatagataaggtaataattctaatggaatttcaattgaagatgtatcatttgaaagtttaattgtagttgcactttctaaaggctctgcatttttaaaaaatggtgtcatatttattgcaaatgaatcttctaatacagcacgtttacgatacttaatttcagagtttaatgtaggaggattggtttgtccttctaaaatagccctattccattcgcggttatcttcaaatttaataggtttagttccttcaaaaataccgttttcaatatcttctatttttacttttctatcatcaaaaatccatgttgtactatctaaagtaataggaaatttgacgtctcctttaatttgaatcatcttgcccactccctagtttcaatctaaccattattttatcatatttaaaatgaagggtttattgaataaacttgctttttaaaaggtagtaggataaacttctgatatgaagatatttaatgatagggggagaatgtgatgccgaagcaaatgaacataaatagtgcagcttatgagcaattaaatcaagatgctgaccgaatcttgcatttaattaaggttcaaatggataatttaactatgccatcttgcccactatatgaagaggttctcgacacacaaatgtttggtttacaaaaagaagtagactttgctgtgaaacttggtttagttgataaagaagacggtaaaaatttaatgcttcgtttagaaaaagaattatctaaattgcatgaagcattcacaaacgtataactctaagtctaatgctttgaatatgaaagtgttataatgagcaagaattaatagatgtaataatttatgatagtgactgaaatgttatgtaaataatattttcagtccttttattttattttttacgtttatgtttgttaattaataattacaaagtatataatagtttagacagaatttaatttgataaatcgttttaatgagcatatatagtttaaatttttagaattggatgatcttttttatgaataatttaaaaaatatatttcgatacataggtagaacctctaagtttatcgattatccattattaatttcatatgttattttgtgttttataggtttagtgatggtttatagtgccagtatggtggcagctactaaaggaacgttaacaggtggcgttgaggtttcaggtacatatttttataacagacaattaatttatgttatcatgagtttcattattgttttttttatttcatttatgatgaatataaaagtctttaaacaatcaaaagttcaacagtggattatgattatcatctttgtccttttatttttaacattattggtaggtaaaaatattaatggttcaaaaagttggcttgacttaggatttatgaatttacaagcttcagagttgctaaaaattgctttaattctttatatttcttatgtattaagtaaaaaattaccgcagttaagaggtaatttaagaattatcaaagggccaattattttaattatcctttgtttaggtttagtacttttacaaggagatattggacaaacattattaacattaattattatattagcaatgtttttattcgtaggtataggtgctaagaaaatagtaaaaggacctattttatatattattcttggatttattcttattgctgggttctttattttcactggaatgatgccagaatatttaaaggcacgttttagtacaatttacgatccttttagttcttcttctggaactgggtatcatttatccaattcattaatggcaatcggaaatggaggattatttggtcgaggattaggtaatggaatcatgaaacttggctatcttccagaagcgcatacagattttattttcgcagtaatttgtgaagaattaggactgattggtgccttattagtaataggattattattttttattgtattccgtgcatttatattagccactaaaacatcttcatatttttataaattaatatgtgttggtgtagcgagttatattggtagtcaaacgttcgtaaatttaggaggtatatcagctacgattcctcttacaggggttcctcttccatttataagttttggtggttcatcaatgatcagcttaagtattgctatgggattattattgttagtagcaagacaaattaaagttgaagaaaaaagagcaataaaaaataaaaaaacaaaagtggatattcctagacaatattaaaatcatttaatgatagatgtaaatatgtaactaacattattaagagtggaagcaagaattaaaaaatttgcttccactctttttacatttatgtgacaagttaaaggattactagtctacagtagcgtcttcaaactataaatgataatataaagttattaagtataataattattaatgattacattttaaaatagtgattaagctaacctatttactatattttcattttataaattgtatgtaaaaaagtattagctttctcatgtattttaagataaaattttattatctaattagttagaatattcaaaatataaaggggtgtttcttctttgaatcatataaaaaaattattagtagccaatcgtggtgaaattgcaattagaatttttagagcagcaacagaattaaatgttcaaacagtagcaatttattcaaacgaagacaaaaattcattacatagatataaagccgatgaatcatatttagtgggaaaagatttaggaccagccgaaagttatttaaatattgaacgtattattgaagtagcaaaacgtgcgaatgtagatgcaatacatcctggttatggctttttaagtgaaaatgaagaatttgcaagacgttgtaatgaagaaggcataacatttattggcccgcacctagaccatttagatatgtttggtgataaagtaaaagcaagaacaactgcaattaaagcaaatttaccagttataccaggaacagatggaccaattgaaaattttgatgcagcaaaggcatttgctaaagaagcaggattccctctgatgattaaagccacaagtggtggtggtggaaaaggtatgcgtattgttcgcgaagaaagtgaattagaagatgcgtttcatcgtgcgaaatctgaagcacaaaaatcatttggtaatagtgaagtatatatcgaaagatacatcgataatcccaaacatattgaagttcaagttattggcgatgaatatggtaatattgttcatctatatgagcgtgattgttctgtacaacgtcgtcatcaaaaggtagttgaggtagcaccatctgtaggcttacctgatgaattaagagaacgtatttgtcagtctgcattacaattaatgaaaaatatcaaatatgttaacgctggaacagtggaatttttagtatctggcgatgaattctttttcattgaagtcaatccacgtgttcaggtagagcatacgattacagaaatgattacaggaattgatatcgttaaaactcaaattttagtagcagatggagcaagtctatttgacaaacgtatcgctttacctcctcaagaagaaatccaaacacttggttatgctattcaatgtcgtatcactaccgaagatcctacaaatgattttatgccagattctggtacgattattgcttatcgttcaagtggtggttttggtgtacgtttagatgcaggagatggtttccaaggcgctgaaatttcgccttactatgactcactattagtgaaattatctactcatgccattacttttaaacaagctgaagaaaaaatggaacgctctttacgagaaatgcgtattcgtggtgtaaaaacaaatattccgtttttagttaacgttatgcgtaatgaaaaattccgaagtggagattatacaacaaaatttattgaagaaacaccggaattattcgatattgcacctacattagaccgtggtactaaaacattagaatacattgggaatgtaaccattaatggttttccgaatgtcgaaaaacgtacgaagccagactatgagtcaacttcgattccgcaagtttcaaaaaagaaaattcaacatctatatggtacaaaacaattactagatgaaaaaggccctagtggagttgcagattgggttaaagcacaagatgatgttttaattactgacacgacattccgtgatgcgcatcaatctttacttgctacgcgtgtacgtacaaaagatatgttaaatatagcttctaaaactgctgaagtatttaaagatagtttttctttagaaatgtggggaggcgctacttttgatgtggcatacaacttcttaaaagaaaatccttgggagcgtttagaaaaacttagaaaagcgattccaaatgtattattccaaatgttattaagagcttcaaatgctgtgggttataagaattatcctgataatgtaattcaaaaatttgtagatgaaagtgctaaagcaggtgtagatgttttccgtattttcgactcattaaactgggtagatcaaatgaaagtggcaaatgaagcggtacaaaaagcaggtaaaatttcagagggtactatttgttacacaggggatattttaaactcagaacgttcaaatgtgttcactttagattactatgttaaattagctaaggaattagaacgtgaaggtttccatattttagcaattaaagatatggctggcttattaaaacctagagcagcatatgaactggttggagaattaaaagctgcagttaatttaccaatacatttacatacacatgatacaagtggaaatggtttattaacctacaaacaagccatcgatgctggtgtagatattatcgatacagctattgcatcgatgagtggcttaacaagtcaaccaagtgtgaactccttatattatgcattagatgggtttaaacgaaatatgcgtacagatattcaaggtttagaagaattaagtcactattggagtactgttcgcccatactacgttgactttgaaagtgatattaagtcacctaatacagaaatttatcaacatgaaatgccaggtggtcaatattctaatttaagtcaacaagctaaaagtttaggtcttggtgaacgttttaatgaagtcaaagatatgtatcgtcgtgttaatttcttgtttggagatattgttaaagtgacaccatcttcaaaagtggtaggagatatggcgttatatatggtacaaaatgatttagatgaacaatctattattgaacaaggttataaattagattttcctgaatcagtagtgtcatactttaaaggtgagattggtcaaccagtaaatggctttaataaacaattgcaggatattattttaaaaggtcaacaaccgctaactgaacgtccaggagaatatttaaaaccagtagattttgatgaaatacgagaacaattacaagataaaaattatggtgaagtgactgagcaagatattataagttatgtactttatccaaaagtatttgatcaatttattcaaactagacaacaatatggtaacttatcattacttgatacaccgacattcttctttggtatgcgtaacggtgagactgtagaaattgaaattgaaaacggaaaacgtttaattattaaacttgaaacaattagtgaagcagatgaaaagggtaatcgaacaatttattacgtgatgaatggtcaagctcgtcgtattacgattaaagatgaaaacataaaaacaaatgcgaatgtaaaacctaaagcagataaaacaaatccaaatcatataggagctcaaatgccaggaagtgtgactgaagttaaagtttcagtaggtgatgaggttaaagtaaatcaaccactattaatcactgaagccatgaaaatggaaacaacaattcaagctccatttaatggagtgattaaaaaagttactgttggaaatggtgatgctattgcaacgggagatttattaatcgaaattgaaaaatctgagtaggtattaaaaagtttaaaagcataagatagaaagttaaatgacattctatcttatgcttttttgcataaaaaacacgttagagattccatgttttacaataactctaacatgtcttttaaaactttatttgatttttgatttttcacttctaattgaacgaagcatgagtaaaataaagtaagcgattaagccaaaaagtatagtaatacaaagtgcgtgtagcaatgcaataattaaattaacatgtgtgattacagacaatgcacccgtaatcacttgtaaaataattaaaataaatgcagcagtatagccatatctaattgtacggttttcagaataatttttgatggcatgaataaatgtaatcataatccaacaaaaagtgataaatgccataccgcgatgtgcaaattgtacccaatcttgctcagtatggggtactaaattattaaacggcaatggccagcttccatatgctaaacttgctttagcgtggcgaaccaaagcaccagtgtaaatagtgacataaacaacgcccgtcataatccaagtaagattgcgcaatggtttttttataaataattcatcagcctcatattttttatccacttcaaaaataataagcattaatacgaacacagaagaaaaactaattaatgaaattccaaaatgtaaggctaaaacgtaagaattttgttgccaaataacagctgctgcgccaattaaggcttgaattaataggaaagcgacactaataattgctaaaggtttaacctcttttatgtatcctatatttttccaagctgtgatggccaaccataacacaacaattaatgataaacctgatacagctcggtgactcaattcaatgattgtagcaattggcaaattctgaggtaataaagcgccgtgacataaaggccatgaagcaccacagccatcttcagagcccgtcttagttactaaggcgcccccaagttgtaccaatgccataataattgttgctacgattgataaccatttaaggtttcgtttgttaaacaagtttaaacaccccatcattaatttaaaatattttgtaatatgatatccatttatgctctgattttaatataaaagatataattataaatattacaactattatactacaataattaaagacaaaaaattagtgagacaggaagtcgttaaagtgtcacaatttaaatagatataacctagccttttataagtaattattatatcatagtactatatgaaaattttaaggaggggaaccatgagtaaagaacacactttatcacagccgtcaagtagagtgtcttttaaagaactacaacaaattattaaaatgggcttggtacagggtaacctaattcctgcttttgcaggcgcttggttagctattgtaatgacaaatcattccttcctatcgtcaatacctcaaatcctattaatgttgataggttcgacattaattatgggtggtgcttgtgcattaaataattattatgatcaagatatcgataaaattatgccaagtaaacaaagtagaccaacagtaaacgatagaatttcagataaacatttattaatgttaagttttggtatgatgttagtaggagaagcatgtttattcttattaaatgtgccatcaggtgttttaggactttttggtatagtaggatatgtatcatattattcaatctggtctaaaagacatacgacttggaacacagtagtaggaagttttccaggtgctgtgccacctttaattggatggacagctattgatggacaaataagtcttgtagcttttgctttatttttagttgtcttttgttggcagcctattcatttctatgctttagctattaaacgtagtgatgaatattcattagcaaatattcctatgttaccttcagtaaaaggctttaaacgtacaagagtaagtatgtttatttggttagtatttttattaccattaccgttcttattatctagtttaggcactacgtttgttgtattagcaactttattaaatcttggatggatttttataggtttaacaacatttaagaaaaatactgatcaaactaagtgggcaacaaaaatgtttatctattcactaaattatttagtagtattctttgcattagttgttgtcatctctttaataaaaatgatttaaaatatctaagttaaataaggatggaacatatgagtttaccaattctaccaactattagtacaagctgtatcgtaattagtgctattttagtagcaataggatggtggcaaattgctcatcgtcatgttaatactcacaaaaaagttatgttatgggcagcatttttcgcattaacgttttttataatttacgcaactcgaacgatatttataggtaatacagattttggtggtccagattctgttagaacatattataagatattcttaatcttccacattaatcttgctacgattggtggcgtattaggattagttcaaattattactgcatttaaagataaatttaaatggcatagaagaatcggacctgtcgcttcaattatatggttctttactggtattacaggtgtggcagtatacttattactatatgtaatttatccaggtggagaaactacatcggtgattaaagccacactaggtttataacaatattgaatattttaaagaatagcctgggacataatgagtgtctcaggtatttttaatattttggcagtcgatgatcaaattgtttagtataaattatgttttaatattaattgtttattttatttgtaaataggtataatgtagtttaattaataaatttggagtttagaaaaaaagaatggcttgattgttaaaatagttattttgtacaatatatataattctaaagaggtgggggagcaatgactaagttagtaatcaaagttttaggagtcgtatttttaattacatttttaatttatttattttactcaccaagattaaaatttgatgttcttgaaaatcctaataacaacaataaaataagtcattcaaatcaagtatcacattccgtgaaaaaacagactgaaaatcctgctcccaaaaatgggataggtacttggatagataaagatattaattatcttacaaataaatatggacaagcaaatcgtacatatcctgttaaaggcggatatactgattatatatttaagagaaaacaacaatattatattgttactacaaaacatgatgaaattaaatctgtttatgctactggagaaaaagctcaaaccggatcattaaaaatcaatgaaaatgcttcacatatatttgaaaaaactagtattaatcctgacccctcttttaaagtgaatggaaaacaatataattttgagttatcagatgaagatattaaaactcaaactctaattaaatatggtaatatttatgctcaagtttatgtggatcaacaatcaaatcgaattatgggtattcgatatctagataaagaactattagcatttataaaaccttatcaattaacagatgaagaagatatttcagatgataaatttaataatgacagaaataataaagattcattaccatatgaacaaagcccaaatcaattgataaccctctatgaaattactaatcaaatgagagatttaaaacatattccaccattgaaagtaaattcagacatttcacatattgcttcagcaaatttatatgaagcaactggtacagaagatgttgaatttacagaagaagcccttaagagccaacttggtaacgaaaacattgactttatagctacaagtcaaaatgtgggctatgattttgatgacgtgcctacattaattcatagttggatgaattcggatatacaccgttcaagaatgttaaataaaaagtataatgaaatgggtggagaagtaatgagaaattattattcacttatttttgtacaaaaataggttgtgaggtgaccgataatgtatacagaggaaacattatcaattttagatgaaattgaagatttatcagacatgattgtacaatcaaaagtgtattttaattatagagaagctcaaaaaacacttaaacaagatgatgaagcacatttactgtatcaagcttttttaaaatcaaaagaacgttatgatgaagtgatgcgctttggtagatatcacccagattatcaaaatgtaatgttagatacacgtcgacgtaagcgagcttatgaaatgttgcctaatgtaatggattacaaatctaaggaagtacaattacaaaatttaatagatgaagtgttgactaaaatcgcattatctgtgtcagaaaatgtaaagattgaagtgggtaatccattttttaaaacggattctaaaggctgcgcctcaggaggtacatgtaattgtcgtttataattaaaaataaaatctagtaaatcagaggttgagttgcaaaatgagatgtcagcatatttttactttaattattgaagattaatatattaaaagaatctgagacaactatgatgtatgtcccagattcttttatgtatatattttaattttatatagaatgagtgtatttaatttgaggtatgttgttttagtagtgatttaaattgtttacctaaatcaggacggtcagtaacaatggtgtggacacctttttgatacaaatcatacattaagtcaacattattgatgccataataacctggcacaatatttaataagttaagccattgaataaaatgagttgatgataatgggatacctttgaattttataggcatttgaaatgtgtcagcttgaggatgataatgataacctagtcctaaaataaacttaatcacaccttcagtcacttcatgttgacttgcaccagtagctatttctccattgcttattgctctaaaacgttcattttgttttttatggaaacttgttacaagtacacgtttctcagcatgatgatgctttataatatcatacatttttttaggcgcaatagctccttcataactacttggagtatcttttaaatctacattgatatatttgctaggatacatttctaaaagttcatcgaaagttaaaattttagcttgttgatgacctctataaatatggcgaccattgatatcagtaaaatgaaatcctgcatctaatttttttaattcttttaatgtgtaatcacatacttttcctgaaccattagtagtacggtcgactgtagcatcgtgaaaaacaatcaattcttcatctttagttagtctcacatctgtttcaaagccatctaaaccataatcaacagcattatcgaaagctaattgtgtttgttctggtcgaactgacattccacctctatgtgcaaaaatataaggtgctggtccattaaaaaagtaaggtatgtctttaagcattttaggcttttgatttctttttaaaagtaataaactgcttagtatacccatactagtgatacccaaattaaaaaaattcttcttaatgtgtttcaaggtataacctcctaaagttcatttaaaattaataattaaagaaatatttttcgaaagttaagtgttgagatattgaatgtattttataaaattattagtcatggtatagtaattatgcataataaatggagtgagtgaaataatatggaattgattccaagagttagcttaattatttacttaaagcatattaaacatgaaagacagatacgtaaatatggacatatcgtttatactaataaacctcgaaagtatgtagtaatgtatgttaatgaacatgaagtagacgatattctccagaaattaatgaaattaaaatatgttttacatattgatggatccccttataaaaacttgaaaaaaacatatgataaagaaaagcatgaaaagctttaagatgtatttaaacattgttattgcatcggtgggatccaattttgtaaacgaagtacgctaattaaatatttaaaatataaatcattcgtatgaaatgcatttggcggttgaacatcaatgccgacaataggaatatcatacgattgagcttgttcattaatcatctcaaattttttattactatttgggtaaggatattttaaagcgtttaacatcatatatatggcttgaaattgtttaccggtcgtaggattcataataattgcgactgatgataattgtttgtctgactgtggtgtatggaaatagacaaccttgtctattcttgcatgattatattcaataagagtaagaaattcgaataaatctgtaagtccttctcctaaaataataaatgattgtttcataaatatttaattctcctttttcaaaataaattatagtaaataaatgaatgaaatggaagtgtaagtcaaaatgagagtcattgctggaaaacataaaagtaaaccactagagagtttagaaggacgtaatacacgtccaacaatggataaagttaaagaaggtatttttaacagtttacatgaagtatacggcttaggtttagacttatttgctggtagtggtgctttaggaattgaagcactttctagaggtatggataaagttatatttgtagaccaaaactttaaagcagttaaagtgatccaagctaacttgaaacaattaaatttagaggaacaatctgaagtatataaaaataatgcagatagagcgttaaaggctatcaataaaagagacattcaatttgatttcatttttttagaccctccttataataaagggctaatagataaggctctagatcaaatttctaagtttaatttattaaaagaacatggtattatcatttgtgagtttagtaatcaagaaaaaatcaatacatatgattttgaagtaattaagcaatatcattacggtttaacagatactttgttattaaaaaaaggagaacacaatgactaagacaaaagcagtcattccaggtagttttgatcctattacttatgggcatttagatattatagaaagaagttctgatcgatttgatgaacttcatgtatgtatattaaaaaatagtagtaaagcaggtacattttctattgaagaacgtatggaattaatacgtgaatctgtaaaacatttgccaaatgtgaaagtacataattttaatggattacttgtcgatttttgtgataaaataggcgctaaaacaattattcgtggcttaagagcagtgagtgattttgaatatgaattacgtttaacttcaatgaataaaaaattaaatagtaatgtagaaacaatgtatatgatgacaagtacaaactattcatttatcagttcaagtgttgtgaaagaagtggctcaatataaggcagatatttcagatttcgtacctaggcatgttgaaagagcattaaaagaaaaatttgaagattaaaaaattagcgtatagaacagaaatgaaatgttccatacgctttaattcaattatttaatctaattacaggggtattaaaatcatttttctgttgacctgataataagttataaatatcggtagatttaatttcatttttaaaaaaatgagcagatgttttattaatattagtgatgaattgacgctctggaaatttggtttttaattgtttgagataactttgtccgcgacgattcattcctaaaattcttacagctgaaatggattgaatagaatcttctttttttacatttaaaagaatttgcataagtatgcgttgtaaatgagtataggtaaagcgttttgtcttcagtaaagacataaaggattcaaaagaagtggcttgattgatatatttttttaatcgatgttctagtccttcagatatagtgtatatatgagccatttcatgaattgaatgacttaagatatgatatttaatcaagctaaatgtatcctctttagttaaatgaggtgttgtatacagtgattgaattgaagagggaacaactgtagtccactgagtttcttgagtgattaacgactgcctaattgcagaaccacttgcaaaggatgatgtttcaattgtcgcatcatgatgatgagcatgcacacgttggatagcaagtcctttcatgtgaggtgcaaattgttgtatagcttttaagtaagtgattgctaaaatattattaggcattttcagcaaagtattatcgctaattaaatcatttataatttttgcataattactaccttcttttactttttgattaaaagttgaactatgttctaaattgattatttcatttgcaacgtttttaaggcgagttatatcaggtgtttcacttccaaaagcaatagtattaacatctagataacgagcaacttgaacagctatttgtgcaaaataatcacttgaagaaagactagcgataaggggtaactcaacaactaaatcgacattggaaagtgccatttgtgtacgtaggaatttgttataaatagcaggttcacctctcataacgaaattaccactcatgattgcaatagagatctctgcatcggactgtactttagcttgttgcgcatgataagcatgaccgttatgaaatggattatactctgtaatcaatccaacacttttcatttgcaattcgtcctttcagtattcattattagtattgtaacagataataagatgttaagaaaaaatcttgacaacttataatagtaaagttaaaataaattttgtgtttgttagaggtgaagccatatgaaatggtcaataacgcaattgagaaaatatcaaggtaaaccttttgaattcaatgaaaaggcgaactttgacgatttaatagaacctttaggtctgattgatttatcagagatgaatatcgaaggtgaattaaccataaaatcaaatgaagtgatagcagatatgcatgttactggtacgtatactatgccttgtgctcgtacattagtgcctgtagatgtgccacttgatgtcagaacttccgaaatatttgatttagaaggttataatagttataccgatgaagaagtagatgaagatgaacattatcatcttgctacagatggtatgattaatatccgagatattgctaaagaattggttattattgagaagccaatgcgtgcattttctgagaatagtgatcaaatgcttacagaaggtaacggttgggaagttattgatgaagaacaagcgcttgagcttgagcactctaaagataacgacgattcccaaacacgccaagttgatcctaggcttcaaaaattacaacagttatatgataaagagtaatagcaggttaatttaatttatagtataataattaaatgaccgaatacttgagattatgtgttttaatattaaggaggatatatcatggcagtaccaaaaagaagaacgtctaaaactagaaaaaataaacgtcgtactcatttcaaaatttcagtacctggtatgactgaatgcccaaactgtggcgagtacaaattatctcaccgcgtatgtaaaaactgtggttcttacaatggtgaagaagtcgtttctaaataatttatatctatttaaaaaaggtggaatacgaattcattatgaattctatcccactctttttttatattatctcaatttataccattgctatcaaaaataatttggagagactattatggaacaaattacttcaacacaaaataataaaattaaattagcaaataaacttaaaaagaaaaaagaacgcgataaaacaggattagctctcatcgaaggcatacatttaattgatgaagcatttaaaagtaatatgatgattaaacaattatttgtaattgagccagaaagaacagattctagacttttagagtatgcaaaagaagcttacgaaattaatatgaaagtggctgaatcattatcagggactattacaccgcaaggtttttttgcagtcattgaaaaacctaaacatgatatctcaaaagcgaaacaagtgttattacttgatcgtatacaagatcctggtaacttaggcacgttaattcgtacagcagatgctgcgggtatagatatgattgtaatggaaaaaggtacagcagacgcataccaagataaagtaatgagagccagtcaaggaagtgtatttcatattcctattgtcacgacagaattaaataaatttattgaacaatttgatggcccagtatatggtacagccttagaaaatgctgtgtcctataaaaacatcgaatcgcaagacacatttgccttattacttggtaatgaaggagaaggtgttaataaagaattattagcacatacctcgcagaatcttattatacctatatacggcaaagcggaaagtttaaacgtggcgattgctggaagtattttgctttatcatttgaaaggttgaccttttgatttaaaatcgactatacttaattgtatacaaaattaaaataatatgtttattaaagataaatataaaccgataaaaagacgtaaactaaatgattaattgcacagggaaagtaagcgtgactgaaacttacttcaatttacattagtttttttcacctttttggttacttaaagaaatttaagtcggagtgcatcttcgttaacaatgctaacaagtgtatgcttaggcataaatttgggtggtaccacggaaggctttcgtcccagttatttagggatgaaagtctttttttaatttaataaagtaaattttatgataaatagaaagtatgaggtgtaagtcatgactcaaaatgattcaatgacagaattaagacaacaagctttagtagacattaacgaagcgcaagatgaacgtgctttacaagatgtcaaagtaaagtatctaggaaaaaaaggctctgtaagtggtttaatgaaaaatatgaaagatttaccaaatgaagaaaagccagcttatggacaaaaagtaaatgagttaagacaagcaattcaaaatgaacttgaagaaaaacaagaattattaaaaaatgaaaagttaaaccaacaacttgctgaggaaacaattgatgttacattacctagtcgccaaattaatattggctcaaaacatccattaactagaacggttgaagaaattgaagatttattcctaggattaggatatgaaattgttgatggatacgaagtagaacaagattattataattttgaagctttaaaccttcctaaatcacatccagcccgagatatgcaagatagtttttatattacagatgagattttaatgcgtacgcacacgtctccagtgcaagcacgtacaatggaaaaacgtcacggtcaaggaccagtaaaaattatttgtcctgggaaagtgtatcgacgagattcagatgatgctacacatagtcatcaatttacacaaattgaaggtttagtagtagataaacatatcaaaatgagtgatttgaaaggaacgttagagttagtagctaaaaaattatttggtgctgatcgtgaaattcgattacgaccaagttatttcccattcacagagccatcagtggaagtagacgtctcttgtttcaaatgtaaaggtaaaggatgtaatgtatgtaaacatactggatggattgaaatcttaggtgcaggtatggtacatcctaatgttctagaaatggccggttttgattcaaatgaatattctggctttgcattcggtatggggccagatcgtatagcaatgttaaaatacggaatcgaagacattcgtcatttctatacaaatgatgtgagattccttaatcaatttaaagctgtagaagatagaggtgaagcataatgttgatttcaaatgaatggttaaaagattacgtagatgctggtgtacctgctaaagacttagctgagcatattacacgtacgggtattgaagtagcagatattatagattactcaaaagatattaaaaatgtagtagtaggatatgtaacatctaaagaaaaacatccagatgcagataaattgaatatctgtcaagttgatataggtgaagaagaacttgttcaaattgtttgtggggcacctaatgttgatgaaaatcaatatgtgattgtggctaaagtaggtggacgtttacctggaggtattaaaataaaacgtgccaaattacgcggagaacgttcggaaggtatgatttgttccttacaagaaattggtgtctcaagtaatgttgtaccaaaagactatgaaaatggaattttcgtatttcctagtgaagtgacaccgggaactgatgcattagacgcattatatcttaatgatcaaattatggaatttgatttaacacctaaccgtgcagacgctttaagtatggtgggaactgcatatgaagttgcagcattatatcaaactgaaatgactaaaccaaacacaacgcttaacgaaactgaaacttcagcaacagatgagttatcagtgacagttgataatcctgaaaaagttccttattacagtgcaagagttgttaaaaatgtgagaattgcaccatcacctatctggatgcaagcacgtttaattaaagctggtatccgtccaattaataatgtagttgatatttctaactatgtattacttgaatatggtcaaccacttcatatgtttgatcaagaccatatgggttctaaagatatcgttgtacgtcaagcgaatgaaaatgaaacaatgacaacattagacgatactgaaagaacgcttattgatacagatatcgttatcacaaatggtaaagaacctattgcattagctggtgttatgggtggagatttttcagaagtgactgatcaaacaatgaatgtcgtagtagaaggtgcgatttttgaccctgtatctatccgtcacacatcacgtcgtttgaatttacgtagtgagtcttcaagtcgttttgaaaaaggtattgcaacagaatttgttaatgaagcagtcgatagagcttgttatttacttgaacattatgcttctggtgaagtattaaaagatagagtggcacaaggggatttaggttcacttgttacgccaattgatattactgcggaaaaagtaaatcaaacaattggttttaatttatcaaatgatgagattaaagctattttcgaacaattaggatttaaaacgattcaaaatgccgatactttaacagtatatgtaccttcacgtcgtaaagatatttcaattaaggaagatttaattgaagaaatagcaagaatatacggatatgataatattccttcaactttaccagtgtttgatgatgtaactagtggaaaattgacagatcgtcaatataaaacgcgtacggtaaaagaaacactcgaaggtgcaggattaaatcaagccatcacatattcacttgtgtctaaagaccatgccaaagattttgcattacaagaacgtcctacaattagtctacttatgccaatgagtgaagcgcattctacattacgtcaaagcttattaccacatttaatcgaagcaacaacttataacgtagcacgtaaaaacaaaaatgtaagattatatgaaattggacgtgtgttctttggtaacggcaaagatgaattaccggatgaaatcgaatatttaagtggtattctaactggagaatatgtagttaatacttggcaaggtaaaaaagaagagattgatttctttattgctaaaggtgtagtcgatcgaattgctgaaaaattaaatttagatttcacttataaagctggcgaaataaaaggccttcatccaggtagaactgcgattgtttcattagaaggtaaagagataggatttgtaggagaattacatcctcaattagcagctgaaaatgatcttaaacgcacatatgtatttgaattagactatgatgcaatgatgcaagtagctgtaggttacattaattatgaaccaattccaaaattccctggtgtgtcaagagatatcgctatggaagtaaaacgtgacatgccttcatcagaattattagacattattcatgagaatggtgaagacattctaaaaaatacacttgtatttgatgtgtatgaaggtgaacacttggaagaaggtaaaaaatcagtagccattcgtttaaattatttagatactgaaaatacacttacagatgaacgtgtttctaaagtgcatgataaaattttagaagcattaaaagctaaaggcgctacaattcgataataaattaaagaagagattgggatatacatcctaaaaaatagccagtaaatgagtttattataaagtcatttactggtttcattatttacaatactttgtatagttggttcgctttattagggaataaatttagtctgtagtctttagcgtatcttattttatcaagagtcgcgctaaaatactttttttatgtaattttacatttaaatacttttaaaaaataaggtcctttcgtataatttaataaacttcattaaattaacgaggtaccttatgtataaagattctaacatgactcaacttacttgaccgatagaaacttcagcacttgttcccgcaaacgatgtgtcacgatatgtaaataaaagtgttgaaacaattctcgatactgaatttgatgaatttagacatcatcgtatagcattctaaaatgttctttattgatactttttattaaccaacgtccatgctttatcacgatttttaaaatgtttttttgaaatagaatctaacttactaatattatatttttcaataatttgagcagcgattaaatctactttatgactcgcgccttttggaatatcaaaatgcatcatttttgatattgaatccatgtgcttaataaaagcatagcgagaaatgatacttgctgctgcaatagcaagggatttagattctccctttgtttcaaattttgtttgatttggaaaaggtaagtcgcttagagcataacgcttgtagacgttacgttctgcaaattggtcaatgacaatgtagtctaatgctttagtatctatcttgttagttacattttttatcgcttcattatgaaggactgctttcatttttacttgagaccaacctagtgcttgtctttcattatatttagtattgtttaatgtaagtaatgaatgaggaataaaggtaatcagttgttctgcaagttctataattttagtgtctgttaattttttcgaatcatctacgcctagcgttcttaaaatatctatatgctctttagatacaaaagcagcacaaaccgttaatggaccaaaataatcgccacttcccgcttcatcactaccaatacagttataatcattatatgttatattatgtaaatcatctgcctttgaagattttgaattagttacagaatcagtagtacaaaattgacgcgctatatgttcagcatgttttccttgaaacataactttaccagaattgtaaatactaatgacagtgtcatgatatttggttcttgctttcatcccattaggtaaattggatgtactaaagttaatttggttcaacagttgctcaatatcttgattagttaatttatgtactacatttcccataaaatgtttaaacctctcttttaaaattctaatagatatactttaacataatgaagataaaaacgtaggtttagtggtataaataaatagtattttaaatctataattacaaataagagacgctcatgtataataataataatctacttattcactcaacaaaacattagtcaaagaaatttaaaatattatcaaaagtcaggagttaatacaatgggagaatttaaaaatcgtattaatgtatcgatcaatgatcaaaattttacgattatcggtgacgatgatcctgaacacatacgttatgtagcacatttagtagatgaacagctaagattattaggacgtaaatcagcaggattagatacaacaagaaaagcaattttaactgcagtgaatatcatggacgaaaaagtgaaattggaagaagaaaacgaaatattaaaacaaatgatttatgaattaaaacaacaggatagctaaatgactatagatttagtaatgatacttattattttgatgtatatgataattggttttagaagaggcctttggctgaatagtcttcatttgtcgtctacgcttgtctcactattcattgcgcatcgtttttaccaatatatatcaaaacaaatgattgtttttgttccatttcctaaaacagttgcttttgatacgcacttcgcatttcaatatcatgatgtacaacaacgttttgatactattgtggcatttttatgtattgcttttataagtaagttgcttttatatcttattattgtaacttttgataatatagtgtcatatcataatattcatgttacaagtcgaatattgggaagcttattaggtagtattgccagtgtgattgtactgcaacttgttttatatttagtatctttatatcctaatgaatggattcaagaaagtttaaaacacggttatttaagccatattattctatttaagatgccgtttttatcatcttatatactaaatttataaataaaaaaagataaaaggtcaggactaggtgatggatataaacctcctggtctctttttatggagtgaatgtaatgacaaagaaagatgtaattcaactactagaaaaaattgctatatatatggaattgaatggagaaaatacgtttaaagtatctgcttatcgtaaagcagcacaaagtcttgaaatagatgaacgttctttagatgaaataaaagatgttactgaattaaaaggaattggaaaaggggtaggagaggtcattagcgaatatcgagaaacaggtacctcatcaactttaaaagaattgcaacgtttagttcctgaaggattaattcctttaatgaaaattcaaggtttaggtagtaaaaaaattgcaaagttgtataaagagttaaatattacagataaagaacatcttcaagaagcttgtgaagcgggaaaagttagtgaactaagtggatttgctaaaaaaacggaacaaaacatacttgaagcagtaaaagcactaggagctaaaaaagatcattatcctattgatttgatgcgacatttaaataaagatattatgacttatctagaacaattagaagaagttgaacattattctgaagcaggtagtttccgtcgttataaagaagtaagtaaagatttagactatattattagtacacgacaccctcttcatgtacaacaacaccttttaaatattccaaataaagtgaaagaagtcgcagttggagaaacgaaagtgtcacttgaattggaatatgatgatgaaacgattggtgtagattttagacttgttgaaccagaagccttttatcataccttacagcactttacaggttccaaagatcataacattcgcattagacaacttgctaaagcacaaaatgaaaaagtgagtgagtatggtatcgaacaacaagatggaacgttactccaattccaaagtgaagctgaaatttaccaacacttcggtagacattggattgctccagcaatgcgtgaagatggcagtgagtttgatcgtgatttaaattcaatcattacattagatgatattaaaggtgatcttcatatgcatacaacgtatagtgacggcgctttttctatacgagagatgattgaagcaaacattaaaaaaggctatgaatacatggtcattacggatcattcaaagagtttaaaagttgcgcatggattacaagttgaacgattattacgtcaaaatgaagaaataaaaaatttgaatgaagaatacacagaaatagatatttactcaggtacagagatggatattttacctgatggatcattagattatgaggatgatatactatcgcaacttgactatgttattgcagctattcatcaaagtttcaatcaatctgaagaagagattatgaagcgcctagaacatgcatgtcgtaatccttatgttagacatattgcacatccaactggtcgtattattgagcgacgtgaagggtatcaacctaatatagaacagttgatgcaacttgcagaagaaacacaaacggtaatggaaattaatgctaatccaaaacgattagatttaaatgctgccactgtaaaaaaatatccaaatattaaattaacaattaatacagatgctcatcatgtggatcatcttgattttatgaaatatggcgtagctactgcgcaaaaaggatttgtaaataaagatagagtgattaatacaatgacgcgtgacgcttttaaaaactttattaataataatattaaattacagaaatagagggattgtatgagacaaaaaacattagacgtcttagagtttgataaaatcaaatcatttgtagcttctgaaacgataagtgatttaggacgtgaaaaagtgtctaaaatgtctccagcaactgattttgaaactgtagaatttcaaatgaatgagacagatgaaatatcacaaatttataataaacatcgtttacctagtttaagtggtttatcaaaagtatcaccattaattcaccgtgctaaaattggtggagtgcttaatgttaccgaattaaatgtaattaagcggttgatacaagtacaaaatcaatttaaaacattttataatcaactgcttgaagaagatgaaggcgtcgtaaagtatccaattttaaatgaaagaatgaatcaactacctgtacttactgatttatatcaagaaataaatgaaaaatgtgatgcttacgatttatatgataatgcaagttatgaattgcaaggtattcgaagcaaaatatcaagtacgactcaacgcattagacaaaatttagatcgtattgttaaaagtcaagctaatcaaaagaaactttcagatgccattattacagtgcgaaatgatcgcaatgtgataccggtaaaagcagaatatcgacaagattttaaagggattgtgcatgatcaatcagcttctggacaaaccctttatattgaaccatcttctattgttgaaatgaataatcaaattagtcgattaagaaatgatgaagcagtagaacgtgaacgtatattaacagaattaacaggtttcgtagctgccgatgatgataattgtttagtggcagagtcggttatgggtcaaattgatttcttaacggctaaagcgcgctatgcacgatcaattaaagggacaaaacctactttttataaggaaagaacggtttatttacctaatgcttatcatcctttattgaataaagatacagtcgtagcaaatacaattgaatttattgatgatattgaaacggttattattacgggacctaacacaggtggtaaaactgtcactttaaaaacgttaggacttatcattgtgatggctcaatccgggttactcattcctacattagatggtagtcaattgagtgtatttgaaaacgtatattgtgatataggtgatgaacaatcgattgaacaatcgctatctacgttttcatcacatatgaaaaatattgtagaaattttgaaagaaacggataaaaatagtcttgttttatttgatgaattaggtgctggaaccgatccgagtgaaggtgcagctttagctatgagtattctcgatcatgtgagggagattggttcactagttatggcaacgacacattatccagagcttaaagcttatagttataatcgtgaaggcgttatgaatgcaagtgttgagtttgatgtgaatacattaagtccaacttacaaattattaatgggtgttcctggacgttccaatgcctttgatatttctaaaaaattaggtttaggattaaacatcattaataaggctaaaacaatgattggtacagacgaacaagaaattaattcaatgatagaatcattagagaaaaactctaaacgtgtggatgaacaacgtattgagcttgaaaaattattgagagaagcacgaacgacgcatgatgatttggaacgtcagtatcaacaatataaaaattatgaacaaaaattaatggatgaagctaaagataaagcaaatcagcgcattaaatcagctacaaaagaagcagatgatattctaaaagatttaagagaaatgcgagataaaaaaggggccgacgttaaagaacatgaattaatagataagaaaaaacatttagaagatcaatatgaagctaaatccttaaaacaaaatgtaaaaaaacaaaaatgggatgatattcatgctggcgatgaagttaaagtattatcttatggccaaaaaggcgaagtattagaattaagcggagaaaatgaagctgtagttcaaatgggtattatcaaaatgaaattacctattgaagatttagaaaaaacgaaaaagaaaaaagaaaaaccaacgaaaatggtgacacgccaaaatcgtcaaactattaaaacagaattagacttaagaggctatcgttatgaagaagcggttggagctttagatcaatatattgaccaagctgtattaagtaactatgaacaggtttatattattcatggtaaaggtactggtgcacttcaaaaagcagttcaaaatcatttaaaaaaacataaaagtgttaaatcttttcgtggtggaatgccaagtgaaggcggatttggtgttacagtagcagaacttaaataatataaaactagaatgttgatttttttaaaatttgacgtacaataaagcaagcgtttaatcttaacacaagtttatgacaagattaataaatagtgataaagatgagcaagagcaatgcagatatatggaaagtctgttataatttgctcatcatttaatatttaaggaggattggcaattatggcaatcgtaaaagttacagattcaaattttgatgaaaacattcaatcaggtgttaaattagtagatttttgggcaacttggtgtggaccttgtaaaatgatcgcccctgtgttagaagaattagctggagactatgatggtaaagcagacatcttaaaattagatgtagatgaaaatccatctactgctgctaaatatgaagtaatgagcatcccaactttaatcgtatttaaagatggagaagcagtagataaagtagtaggtttccaacctaaagaaaacttagcagaagttttagataaacatctataatatttagtacaattataaaagaatggggcattacatgttatgtaatcgctccgtcttttttatgtgaacgtcaagttaatagaaaggaggagacggatgaccgactacgaagaaaaaattagagataaattaagtgtcgtcccatttgaaccaggctgttatttaatgaaagatcgaaatgaccaaattatttatgtaggtaaagcaaaacgattacgaaatcgactacgttcttattttactggtgcacatgatgcaaaaactacacgtcttgttagtgaaattcgtaacttcgaatttattgtaacttcaagtgagacagaatcattattacttgagttgaatttgatcaaacaatatcaacctcgctacaatattttattaaaagatgataaaagttatccttttataaagattactaaagaaaaacatcctcgtttacttgtgacacgtacagtaaaaaaaggtacaggaaaatattttggaccttatcctaatgcatattcagcacaagaaactaaaaaattattagatcgtatttatccttttagaaaatgtgataatatgcctgataaattgtgtctatattatcatatcggtcagtgtatgggaccatgtgtgtatgatgtagatcaacaaaaatatgcacaaatgacacgtgaaattactgactttttaaatggagaagataaaacaattcttcataatcttgaaacacgcatgctagatgctagtgagaagttagattttgaacgtgctaaagaatatagagatttaattcaacatattcataatttaactaaaaaacaaaaaattatgtcttcagataatacaattagagatgtttttggatatagtgtttctaaaggttggatgtgtattcaagtattctttattagacaaggaaatatgattcaacgtgatgcaacaatgattcctctacaacaaacagaagaagaagaattttatacattcattggacaattctacagcttaaatcaacatattttacctaaagaagtacatgtaccgaaaaatttagataaagatatcattcactctgtggttgatacaaaaattgttctacctgcgcgtggaacaaagaaagaaatggttgatttagctaatcataatgctgaagttgcactagaaaataaatttcaattaatcgctaaagacgaatctagaacgataaaagctatcgaagaacttggtgaaagaatgggcattcaaacaccgataagaattgaagcatttgataactcaaatatccaaggtgttgatcctgtttcggcaatggtaacatttgtggatggtaaaccggataaaaaaggatatcgtaaatacaaaattaagactgtgaaaggtcctgatgattataagtcgatgagagaagttgtacgccgtcgttatacgcgtgtacttaatgaaggtcttccattaccagatcttattatcgttgatggtggtaaaggacatatgtctggtgtcatagatgtactagaaaatgaactaggtttagatattcctgttgctggattaagaaaaaatgataaacaccaaacatctgaattattatacggtacaaatgctgaggttgtacctctaaagaaaaatagtcaagccttttatttgctccatagaattcaagatgaagtacatcgttttgcgataactttccatcgtcaaactagacaaaaaactggattacaatctgttcttgatacagtagagggtataggaagtaaacgaaaaacaaaattattaagaacatttggttccattaaaaaaatgaaagaagctagtatagaagatttaaaagctgcaggattacctaaaaaggtagctgaaaatctacaatatgctttaaaagaagattaatttcaaaaaaggggtatgactttgaatttcataccccatacatatagaaagaatgttacaatatagttaacaaaaggcttatttttttaagaaagtatggaagcgttttctaaatgagaaatattatcattttatagtagttacacaattatcatgtaatacttgtatatctcatttattcgtcttgtttttaattatatttacttttttaagacatacttgtagttatgaaaaataataatactcaatctaataaaaagtagatgtttgatttgtttaattttcagaaaatttacaatcattataactattatatttttatgcatacgagtactaaataaaatagtaaatgcgtttatagtactatcttaaaaagaagctatttaaatttattatgttttataacaggggggactccttttggctaagtctaaaaatgaattttatcttagacgtcttcattcactactagggattattccgattggtgcgtttttaattgttcatttaatgattaaccaccaagcgactcaaggagctgaggcttttaataaggctgcaggctttatggaatctttaccatttttattagtaactgaacttattttgatttacattccaattttatatcatggactatatggtattcatattgcttttactgctaaagaaaatatcggccattattcattatttagaaactggatgtttgcgctacaaaggttaacagggattattgctttcgtattcatctttgtacacctatggcaaacacgtttacaaaaacttttctttggtaaagaaatcagttatgacatgatgcatcaaacgttacaaaatccaatttgggttatcgtatacattatttgtgttattgctgtcattttccatttttctaatggtatttggtcattcttagtgacttggggatttttacaatctaaaaaatcacaacgtattttcacatgggtttcattaattattttcttaattctgtcatacataggtgtgactgcaattttagcttttgcataaaaaatgaaagtaaaaaaagcatagttataaaaggaatcaataggttagtttcagatatattttaggggagtgacaattctatggcagagaaaaaaattattgttgtcggaggtggccttgcggggctgatgtcaacaattaaagctgcagaacaaggtgcacatgtggacttattctcaattgtacctgttaaacgttcgcactctgtatgtgcccaaggtggtattaatggtgcggtaaatactaaaggtgaaggagattcaccatggattcattttgacgatacagtatacggtggagatttcttagcgaaccaaccaccagtcaaagcaatgactgaagctgcaccaaaaattatccatttattagatcgtatgggcgttatgtttaatagaacaaatgaaggattgttagactttagacgtttcggaggtacacttcatcatagaacagcatatgctggtgcaactacaggacaacaattactttatgctttagatgaacaagttcgttcttttgaagttgatggtttagttactaagtatgaaggatgggaatttttaggattagttaaagatgatgaaaatgcagcaaggggtattgttgctcaaaatttaactacttctgaaattaaatctttcggttctgatgctgttattatggcttcaggtggtccgggtattatttttggtaaaacaacgaattcaatgattaatactggatcagctgcatctatcgtataccaacaaggcgctaaatatgcaaatggagaatttattcaaatacatcctacggcaattccaggtgatgataaattacgtttaatgagtgaatcagcacgtggtgaaggtggtcgaatttggacttataaagatggaaaaccatggtacttcttagaagaaaagtatcctgattatggtaacttagtaccacgtgatattgcaacacgtgaaatctttgatgtatgtatcaatcaaaaattaggtattaatggtgaaaatatggtgtatcttgatttatctcataaagatccacatgaattagatgttaaattaggtggtattattgagatttatgaaaaattcactggtgatgatccacgtaaagtacctatgaaaatattcccagcagtacattattcaatgggtggattatatgtagattatgatcaaatgacaactattaaagggttatttgctgcaggagaatgtgatttctctcaacatggcggtaaccgtttaggtgctaactcgttattatcagcgatttacggcggtacagtagcaggtccaaatgcaattaaatacgttgaaaatatcgaaacatcatatactgagttagatgacagtatttatcaaaaacgtgtagatgaagaacaaaaacgtttcgacgaattacttaatatgcgtggtactgaaaatgcttataaacttcaccgtgaattaggcgaaattatgacagcgaacgttacagtagtacgtgaaaatgacaaattattagaaacggataaaaaaattgttgagttaatggaacgttatcaaaatattgatatggaagatacacaaacttggagtaaccaagctgtattctttacacgtcaattatggaacatgttgcaactagcacgtgtcataacaattggtgcgtataaccgtaatgaatctcgtggcgcacattataaaccagaattcccagatcgtaatgacgatgaatggttaaaaacaactttagctgaatatcaaggtgaatatgaagcacctaagttcacatatgaacctgtcgatatcagtttaattccaccgcgtaaacgtgactatacaagtaaatctaaaggaggcaaaaaatgatggctaacaatcaatcagtaaaagaaactccagaagaattacgtcatacagatgaacaacataatcaagaaataacacataaagaagaaaaacacacgcaaaaaacagttaaattaattgttaaacgtcaagataaccaagaagcaaaatcgtatgaagaaacatttgaaattccttataaagagaatttaaacgtgattgcttgtttaatggaaataagacgcaaccctgtgaatagtaaaggagaaaaaacaacgccagtagtatgggatatgaactgcttagaagaagtatgtggtgcttgttcaatggttattaatggtcgtgcacgtcaagcctgttcagcaattgttgaccaattagaacagccgattcgtttggaacctatgagtacattcccagtcattcgtgatttacaagtcgatcgtacaagaatgtttgataacttaaaacgtatgaaggcttggattccaattgatggtacgtatgatttaggaccaggtccacgtattccagaaaagaaacgtcaaacagcatatgaattatcaaaatgtatgacatgtggtgtatgtttagaagtgtgtcctaatgtaacacgtaataataaatttattggtgcacaagctatttcacaagtacgtttatttgatttacatcctactggttcaatgactaaagatgaacggctgaatgctttaatgggtgaaggtggtttacaagaatgtggtaattctcaaaactgtgttaatgcatgtccaaaaggtattccattaacaacgtcaattgcagcaatgaaccgtgaaacatcattccatatgtttaaatcattctttggttctgatcatcaagtaaattaaatatgacatatttgccagcaaagtaaaaactttgctggtttttattaatggagaattcaatacggatataaatgtttattgagtaaaataaaaatgagcaaaaatatcaattaatgaatgattaggtttgtctatggtaaaataaacgtattatgtattataaggatgaatgtaaatgaataaacccattggtgtcatagactcaggagttggaggactaactgtagctaaagaaattatgcgacaacttcctaatgagacaatatattatttaggcgatatcgcaaggtgtccatacggtccaagacctggagaagaagtaaaaacttttacgacgcaacttgctaataaactgatggaatttgatataaaaatgttagtcattgcttgtaatactgcaactgcagtggcgttagaacatttacagcagttattaccaattccagttattggagtcattgaacctggtgctagaaccgctattatgactacaaaaaatcaaaaagttttaattttaggtactgagggcacgattaaatcagaagcttaccgccatcatattaaaagaataaacccaaatgtcgaagtatatgggatagcatgtccaggtttcgtaccactcgttgaacaaatgcgttatgatgaccctacaataactagtattgtaatacatcagactttaaaacattggcgtaacacagatgccgatactgttattttaggctgtacgcactatccattattatataaacctattaatgattattttggtggaaataaaaaagttatttcttctgggcttgaaactgcacgtgaagtaagtgcattacttacgtttagtaatgaacatgcaagctatacgcaacatccaaaacatcgattttttgcaacaggtgatacggttcatattaaacatatcatttctcaatggctgaaattagatgtagaagttgaacgtataaaagtagattaaatttaaaacagaagtgaaaggaagatttaagtggcagacattgttatagcttctaacaacaaaggtaaaataaatgattttaaagctatttttccaaatgataatgttattggcatttcagaaattataaaggactttgatgttgaagaaacaggcactacctttgaagaaaatgcacgattaaaatctgaagcggcagctaaagcactcaataaaagagtaattgccgatgatagtggtctagaagtatatgctctaaatggtgagcctggtgtatattctgcacgttatgctggtcttgagaaaaatgatgagtcaaatattgataaagtacttaaaaagttagaaggtgagacaaatagaaaggcacaatttgtatgtgtcattagcatgagtacgccaaatgaaccaacacatatgttcaaaggaactgtatcaggagaaattacaacagaacgtaaaggtgatcatggattcggatatgatcctattttttatcttccagagaagaacaaaacaatggctgaattaactacagaagaaaaaagcgatgtgagtcatcgtggaaatgcaattaaagctttaaatgaatttttggagcgtgaaaaataatgtctaaatggttaattgtaagtgataatcacactgaatctggaattctgtatcaattatacgactatcataaagacgcagatatatgcttacatttaggagattctgaatttaaatataatgatactgaattaagcttgtatcaacgtgtaaaaggtaattgtgacttttatcctgaatgtccaaatgaagacatcattgaaaagaacagtgttaaagcattatacacccacggtcatctttatggtgtaaatcaaacacgtaggcgtttggctgaaaaagcacaatctcttggttgtcaatttgcgttttatgggcatacacatatagctaaatatgaaaaattaggcgacgtccatattataaatcctggtagtatttcacagtcgcgtagtaatatagaagaaacatacgcagaactacttatagaggatgaaagtaaaaaagctacgctgaattttagaaatagagatcatcaagtcatacaatcaatagaatttgaaattaattaactattaaaagggctaggactacaatgcaagatagtctagtcctagctaatttcaaatttgataccaaacatttagctatttagtttaactaaatagcaacgaagaaagtatgtgattagttgcaattatacgtaattagtggaaaatataaactttttttatattaaagctattgctaaataagatttctttagatataataatacttgtgttaaaaaataatgtcctggtagctcagctggatagagcaatggccttctaagccatcggtcgggggttcgaatccctcccaggacgctaataaaccccgttaaccattgtggttacggggtttttgcttatctattttaaactcactatgatgacttgcttcaagaatttaattattatatttatcccattttccagctgctatgtcagcttcttgttctttaatgttttgatagacttcttcagcgtcatcaccttcgtagtaaccttgctcaattgcatgttttgtttgaagttctccagatgaaagaccgccattatatttttttctgagtgcatcataatactcatcttcagtttctgctgcattgatttcagcattaggatccggagttgcattttcatcatctactgaaacatctgactcatttggtcggtcataaattgatttttcttgaccattttcaactctaagtgaactttgatacgctacactagcaggaccttccattacatttccttgtggaataattccatttgcaactgcactattgtaagcttgtatcttttgttcttcactataatttccataaataattgattctaatgtacttctatctttaatattagagaaatcaatttgattattattttgagatgaaacatcttctatggtatcttttgaatctctttcttcgtttgacttctgttcattacttgtattttcagtattttgattttggatagttttgtcattatgttctatagaattcttatctgattttgaaatatgcttatcttctttctcttttttattgttggtatcattctgttcttttttattatcaccagttaaagaaaaatcattatcacatgcacttaatattaaaaaactactaaataataaaatgaaatattttttcatatgtattctccgttcgttcactcaattagtaattattaataacacagtccttttattcatattttacgtaggaattacttttaacatcaccaccttataaccatttaattaaatttactagaataaatataatgaaaatatacacttttggattatatcatataaatatgtattaaatatttttaattatttatttttataatctaaaaaactttgacgagatagacatatttgaattcctaactgtaaatataaatttttaaattgcacagttttgatgatttaagtataagttacggaaaatgacacaactatctaaataaaccctttatagtaaagataacaaaacgatagttaaacaaaacaaagcaagcaatacagtaacctatcgttttagaattttaccaattaatttctaaggagtgtatgaaatggaaggtttatttaacgcaattaaagatacagtaactgcaggtattaatggtgattggacaaaattaggtacaagtattgttggtatcgtagaaaacggtgtaggtttagttagtaaatatttaggtttctaatttaaagataattataaatagtacaaaggagataacaaacatggaaaaattattcgacgcaatcaaaaatacagtagacgcaggaattaaccaagactggacaaaattaggtacaagcattgttgatatcgtatcaaatggtgtaagcattctaggtaaatacttaggattctaatgtaataacatttaaaaataaaaaaagaatggagaaattcaaatgactaaattagtagaagcaattaaaaatacagtagacgcagcacaaagccaagattggacaaaattaggtacaagtattgttgacatcgtatcaagtggtgtaggtatcttaagtaaagtattcggattttaattaattattaattacgtataaaggggttattaacatggaaaaattattcgatgcaatcaaaaatacagtagacgcaggaattaaccaagactggacaaaattaggtacaagcattgttgatatcgtatcaaatggtgtaagcattctaggtaaatacttaggattctaatgtaataacatttaaaaataaaaaaagaatggagaaattcaaatgactaaattagcagaagcaattgcaaatactgtaacagcagcacaaaatcaagattggacaaaattaggtacaagtattgttgacattgtatcaagtggtgcaagtgtattaggtaaagtatttggtttctaatacttaatagcaagtattcaacacttaaggattaatccttaagtgtttttattttttggcattatttaatgaatcatgacaaatctgctaaaataatatacatactataatttaggagtataaaaatgaaatacgatactattttacttgattttgatgatacaattgtggacttttttgatgcagaagatcgagcatttcatcaaatggcacatcatttcggtcattatccaactgaagaagattttcaatattttaagaaagtaaatcaaaatcattgggaagcatttcaaaaaaatgaactatctaaagaagaagtattaacacatcgttttattaattattttaaagagtatggcatagacgtagatggtaaaaaagccgatgttttatttagagacgaactagctaaagcaccattaaaattcttcaactctactttagaaacaattgatcgattaagccaagaatgtgaattgtttattgtgactaatggtgttacagatactcaaaaacgtcgtattgctcaattagagtttaaagatatcttatctggagtatatatatcagaagaaacaggatatcaaaaacctatgagtgaattttttgattatatctttgagagaattggtgaagaaaaaagaaagacttcaataatagtaggagattctcttacatcagatatactaggtggaaaaaatgctggtattacaacatgttggtttaattatcgtaataaagaaaataacagtgatattgtaccggattatgaaatacaatctttgtatgaattggttaatttagtggaagaatgattaataacagacctgagctaaatggctcaggcttatttatgcaaatagcgtttatagcttaatgatttggaaaccatactagtatattgaacccttatgcaaatctttattattaatttctttttctttaaatgcctcaaataattcaacagtttttttaatttatttaaagatgttgaactttactcatgttttcattatcatttaaattctttatatatattgtatcgtcattaatatacgattttcatttaataacatattaattacttataatctgataaaatggatttgaatttcaatatttaagccgtaaaattgtcatctaaggatataatctttatactgaataagtaatgttatattgaaggagtaagggaatgaactgtaaagtaactaattttcaagaaaaagattcatttattactaagttagaaaacagtgatgaaacattattgaaattttatcaatataatccagtcaaaccatctagttttaatcaaagaatgaatcgtcctaataatggtagagagcaacaacttgctcaagtgattaaatcatatatgtcagatttgaatataacagaaattcaacagactcatcttactgcactcagtgaaggagctaaagtggtaattgggggccagcaagctggtctttttggtggacctttatatacgtttcataaaattctttcaattgttaatttaagtcgtgagttaactgaaacataccaacaaacagttgtacctgttttttggattgctggtgaagatcatgactttgaagaagtaaatcatacgtatgcttataatgcaaaagacgctcaattacataaagtaaaatatcatacaatgacaccacctgaaacaagcgtctctcgctatattccagaaaaggaacagatgattgaagcacttaatcaattttttaaagaattaaaagaaaccaaacatactaacgcactttatcaagtatgtttagagattatagaaaagtacaataattggactgatatttttaaagggttacttcaagaagtatttaaagattacggtgtactatttattgatgctcaatatgaaaaaattcgtgaattggagaagccattattaaaaaatattattcaaaaacataatgaaattaaccaggcgtttagaaaaacacaaaaattaactacgcaatcaggtttaaagaaaatgattgaaacagataccaatgtccatttgttccttcatgaagatagtatgcgtcaactaattattaaaaaagatgatgtattcaaattgagtaaatcagatattacatataataaagatgaattgttaaaattagttgaaaaagaaccaactcgtttttctaataatgttgtaactagaccagtaatggaagaatggctatttaatacggtagcttttattggaggaccaagtgaaattaaatactgggctgaattgaatgaagtatttaaaattttagatgttgaaatgcctattgttttaccaagaatgaaaatcacttatttaccaattagaatagaaaagctaattaatcagtataagttaaatgctgaaaatgttattatgaacggtatagaaacggatagagaaaacttcgttcgtagcaaagcctcagatacatttattaaaaaagtagagtctttaaaagagaatcatgccaaaatatacgaattacttcttaaagaagtgaatgataatcatgacaatatcaatttagtaaagaaaaattatgacattcataataaacaatttgaatatttattaaaccgatatttacttaacattgaaagagataacgatataagtatgaaacattttagagagattgaacatgtattgcatccaatgggtggtctacaagaaagaatttggaatccacttcaaatgatgaatgaatttgggatagatgcgttcagtccttccacttatcctccacttaaatatacatttaaccaaatagttataaaaccttaatttgtaagggagaggagtccgggacataaagtatctagataagtgaaaaaagacaatttctattgaaataatatagaaattgtcttttttataatttttttgattattttcagctcgttgagctgttacttttcttatattcacttaatgatgtgcttgcacttgttgaatcactcacacttgttgacgttgatgcacttaatgatgtgcttgcacttgttgagtcactcacacttgttgatgctgactcacttaatgatgtgcttgcacttgttgaatcactcacacttgttgacgttgatgcacttaatgatgtgcttgctgagtcactcacacttgttgatgctgactcacttaatgatgtgcttgcacttgttgaatcactcacacttgttgacgttgatgcacttaatgatgtgcttgctgagtcactcacacttgttgatgctgactcacttaatgatgtgcttgcacttgttgaatcactcacgcttgttgatgctgagtcgctcgcactttctgatgctgaatctgatgcgcttgttgatgctgagtcactcgcactttctgacgctgactcacttgcactttctgacgctgagtctgaaagactcgtacttgttgatccacttaatgatgtgcttgcacttgttgaatcactcacgcttgttgatgctgagtcactcgcactttctgatgctgaatctgatgcgcttgttgacgcactttgtgaattagctgtacttgttgacgcactttgtgagttagctgtacttgttgacgcactttgtgagttagctgtacttgttgacgcactttgtgagttagctgtacttgttgacgcactttgtgaattagctgtacttgttgacgcactttgtgagttagctgtacttgttgacgcactttgtgaattagctgtacttgttgacgcactttgtgagttagctgtacttgttgacgcactttgtgaattagctgtacttgttgacgcactttgtgagttagctgtacttgttgacgcactttgtgaattagctgtacttgttgacgcactttgtgagttagctgtacttgttgacgcactttgtgaattagctgtacttgttgacgcactttgtgagttagctgtacttgttgacgcactttgtgaattagctgtacttgttgacgcactttgtgaattagctgtacttgttgacgcactttgtgagttagctgtacttgttgacgcactttgtgaattagctgtacttgttggatcagttacattaactttttgaccattaaagaagtttgtcccacctgtcacagatgtagagtatgggttaaatgtaaaagaagtgtctccactagaattgataggaactgtccaagttgtggttaaaccatatccttgtttagcttggaatccattcatttggtagccgtttgcccaagaatatccactaccctgtttgtttatattagttgtgtttgcttttggattactaagttgagcacctgttgaatcggtaatataacttgtcgctgttgaaggtgttccatatgcactacctagtgtaaacatcgtttgataagttgttcctgtgttgtatattgcgtaactattagacaatgctgtaggtatttcaaccgtcttagtagcaggattatcataagtaactgtatacgtaaacgtcatagacgttccattatttacagttgttaatttataataaattggaatattataatttgtatcagtccctgcacctgtataagtatttgtagttgaagttgctgctgctgctgcgaatgttgttgttgccaatctactaaatgttctaagttctagtggtgctgtacttgtagatgtacttgttgaatcgctcactaataatgtagaacctaaatctgtacttatctgactttctgaagtactcgttaactgtgacgtcgttgaatgagtagaaactgttgaaccactattactgtctgatgtagaatttgatgacgttatactattggattctgtcgaattttttcttatttgattatcttttgtactcgttgacgtattgctattatcactggttgaagtactacctttttgactatcagtagatgtagtgttggcttgactattagtatctttctctgaagtagcgctattattacttgttgaattattagtaattgatgaacttgaagctttagtatcagaatttgacatcgagctatcttgcttttcagaatttgatgtagatttatctgacgttgaatctgtacttgtgtgactatctgttgtagatgatgaagtacttttttctgttgaatctgtacttgtttgactatctgttatagatgatgaagcacttttttctgttgaatttgtactagatgtagcatcttcggaggtacttgtttgacttgaaatagactcagttgttgaggtttcagagtttgtaactgtggttgagttttgatttgcgactgtttcactattagatgcaatttctgaagtcataggtgtttctgaggctgcaaaagcatgatgatcatttaacattgcaaatgtaaatgcacccccgacgagtcccgtagtcttcaatgcttgtgtttttaagttatgctgggttgattttggcaaatcatttgtcttttcaacatctttatcaaaaaatgataaacctaaacttcttaataattgaagttctctaatacctgctttaacccaatgtttccctgatttgtaaagtttaactctagctttttcttccccaaaagaacgtttaaaatctctttctttttttgacataatattctcctatatttctaattaatttggttctaactaacttttttacatcaatatatttttaatcattatactactatttataaatatataccaacataaataaatgtattttaaaaaactttacaatttaaatatatatacttaaaattttactctatttattaaaaacatataaatttataactatttcgaattgcatacatattccaatctttgaaagtaagataattgagattatatttattataactataattaaaaacgttttttaatacgaagaaacgcattaacatttataattcctttactagattataccaagttacatttgcatgaatagaatttgataatccttcattaatatatccatgcgattcataaaaacttactaaagtatcgcgacaagtgagagtgactccgaaacgtgcatgttgccttgctatattctcaaaataatttaacagttgtcctgcaatgccttgatgttgaaaatctttcgctacaactaaaccgagtacacttaaataaccacctatattggggttaggtctaatcgatgcaaataaatcatctgtaatacacttattcgaaataactggaccattaatataaccaacgattttattgttttcttctgcaacaataaacgtatccggaatgatttcaatacgctgttttaaagctttagttgttgctgcttcttctttagtaaacccttcattttctaattgaattaaacgttctaaatcatctgccactacatttcgaaaattcatcttctacatcctttcaatgtcataatatagttttatttaatagcgatttatcctatcaacttttaagtgtatgacaaatctgtcatatagatgataggaaatattaaggttgtttttttacgaatatgttagtttataaatgtacatagttatgattatttttgaaaaataaaatcattatctttatgtatatagaatgatcattactaagaactaactacctttgactatacatcactttaaataggtattcggtacaacacttatagcaacttcattcattttttcacatcctagcagaatattgattaacaatatcattatcatatacctcatcagcttattgcttcaaagaacaatactaattaatcatgaccaaaacaaatgactcattacatctagaaatgattacaacataaatcagggtattaactataacatgaatcacattcccgtcatccgttagaatcaacacacaggtttttataatgtttcagcgccacagtgaaatctatctgaagataaggtatcggtttcaatggtcttgtagaggaaaatggatgaagtaaagacaccctagaaaatagtgacaacgtttttaacagttatattgaaaaacagcgcttaatgaaacagcgaacaacgacaactccacctcatgacactaaattaaatgctattcaaacaacacgttactctgacaacacgacttatgtatcgaatcacacatcaatgaaccaccacattatttaaaaacagaacctacacttagttatcatcattcacaatccttaaataatgctacatatttttagtaatgccccttactaaagaatatgacactaatacttcaaaatataattattttagcatattcactcttatactagccttagaagtattagctttagatgcgttattcctaagaaacattaactgtatttttctaagtatctgttactaatactgtaacaacatttctttcatgcattataaaagagctattgtccagttttctaagttctggcaatagctctatttgtttataaaaatgttcaaattatattttctattacacaatacgtttacgaatagctcctgagataaagtcaacaatggctaccataatcactaagccgattaagataatccctactcgatcccatgaacgtgtttgaagtgcaaagataagtggtgtaccaataccgccagcaccgattaaacctaaaatagatgctgaacgtaagtttaattcaaaacgatataaaataagggataagaatgaaggtaaaatttgaggaatcaccgcaaagacaagtgttttagttttattcgcaccacttgcttttaaagcctctgctgatgagaagtctaaactttcaatatcctctataaataatttacctaacatccctactgaatgaatccctaatgcaagtacccctgaaaatgaaccaggacctactgcttttataaaaattaacgccataacaatttcagggaatacacgaatgacactaagaatgaatttagtaatccctgtgactggtcgaacttttactaagttacgtgcacctaaaaatgcgaatggtatgcaaatcactgctgcgataaatgtaccaataacagcaatggcaaacgtttcaagtaaaccacgaagtaagtcttctccagctggaatataaacgtaatcccaatcggggtggaataatccattaaaaatagatttaagaatttcaattgatttagattttaattctaaagcaggcatacctgcaaaaccccaaacaatgatagctaaaacaacaatggcaatgagccaatgtttaatcattctttgtttgtgttcctttgatctcactggatatttcttttctaactgatgctgttcttgtgtcatgcgagtctttccctcactttcgagctgacatagtcaataatgacaacaatgactaaagtgaacagaataatcatcgctgtttttggatattggaataatcctaaagttgagtcgtagaataaaccgataccaccagcacctactaatccaagaactgctgaggcacgaatattaatttcaaatgcaaataatacatatgataaaaatgtagacattgtttgtggaactactccaaacataatccattttgttttatttgcacctacggccgtcatcgcttccattggacctggatcaattgtttcaagcgattcatagaacaatttcgcaataacacatattgttaaaataaataatgccaatacccctggaatttgtccgataccaaaaactgcaacaaagacagcagctaataataaatcaggaatggtacgtacaatatttaaaataaaacgtgatggaatcgtaatccactttgtttttacaatattacttgcacaaagcaatgcaactggaattgatacgatggagcctaagaatgtccctacaatagccatgcgaattgtgtctaacataggtttggtaatggtacttaagtaactccaatctggtggaaccatttgcccaaagaaagaaccgatttgtggaatccctaccattaagtcactaaagctaaagcccgtatataaaaaactccacacgacgagcgcaatcactaaaaatagagttaaactagttttgaaagagaatttcttatttaaatattgatcatatttacttgtagtaggtgttgccatattactccacccctagtttctcatcgtcattaagtttacggccataaatttcattaaatacatcttcattcgcttcacttgccggaccatcataaaccagttctcctgcacgtaaaccaataatacgtgttccatattctaatgctaaatcaacaaagtgtaggttaattaaaatggtaatacctaattcttcattgatttttttcaagtcatccataacttgtttagtagtgagtgggtctaaagatgcaacaggctcatctgctaaaataatcgctggctcttgtgctaaggcgcgtgcaattgaaatacgttgctgttgacctccagacagttcatctgaacgttggtcatatttatccaaaatatttacacgttctaacgcatccattgctttaattttgtcttcttttggaaataatcctaatatcattttccaagttggatgataaccgacacgaccacttaatacatttctcaacacagtagatcgtttgactaaattaaaatgttggaaaatcattcctatattacgacgcatcattaataattctttacctttcgctttcgtaatcgatttaccttcaattgtaatatctcccgaagtaatatcatgtagacgattaacagatcgcaataatgtagatttccccgcacctgataaacctacgataacagcaaagtcacctttttcaatgtttaaattgatgtcttttaaccccacatgaccattaggataaatcttgctcacatttttaaactctatctgactcatgtatgtttacacccttctttttaatacagagaaagaggtcgggacaagatcataagaaatgatatatgcatttcttatatgactcaattgccctagcctcttctctttatcacttatttagttctgtctatgtgaaaattatttcatattttgaacttctttttcgtattttcttacgatatcgaagtctgagtctttagcatctgtatagccttcgtgagagtatacttcactaataattttatgtccttcttttgttttagagatgtctttaaatgcttttttaagtttatcttggaagtctttgttcatatcaggacgaactgaaatcgtatcgttaggaattggttttgttagtttaagaattttagtatctttaaatacatttggttgatcttttttaacaatgttacgtgcatcttggaatacagctgcagcgtcaacatcgccatttaataatgaaatcacagcttggtcatgacctttcatgtttacgattttcatatctttagtagcgtcaataccagtatcttttttaattgttgaaattgggaatgtgtaacctgctgttgaagttacatcttgtaatgcgatttttttaccttttaaatcttttaagctattaatacctgaattctttttaactaagatttctgatttataatcttttacaagttttttgttactagaaccatcttcattcacaccataacgttgtgcttgtaataataaatcagctgctttttgatcatgtgctaaagtgtatgcagttggtggtaagaaaccaacatctacttttttagatttcattgcttcaacaattgtattgtaatttgttgatacagacacttttactgggatacctaatttcttagataataatttttcaagcggttttgcttttgcttcaagtgtatctgcattttgtgatggtacgaattgtacagttaattctttaggtgtatagccatctttacttgaacctgatccaccatccgaattactacttttattattgtctaacgagctattatttccacatgctgctgcaaaaataataactgatagcgctaatactaaaaggtacttcaattgcttcataacctattgcccccgttcgctatgtatacatttatgtaatttgtcaacgcatttcatttgacaatattaagagtagcacaatattaacaaaaataatatttattatgtgtgaattttttatagaattgttttacactgttaaagaattgtaaaatttatttaaatattaactaaacaatctattatcgacttatttttttattataatttttctataaatcatttaaaaatatatttgggagataaaaatatgaaatggataaaagtattaagtagtactattttagcttcagcaattacattatctgcaacgccaatcagtcacgctgcaccaaatcaaactaccactcaaactgtcgcttttgacgcttcacacggccaaacggcaggagctgctgattgggtcattgacggtggcttttccgattatgctgattcaatgcgtcaacaaggatatactgtgaaacaaatcgatggagaatctaatattacacctaatacactacgtggtatcaatattctcgttcttccagaagccaatattccttttaaaaagagagaacaacaagctatgcttaattttgttgaaaaaggtggcaatatcatctttatcgctgatcattataatgcagacagaaacttaaatcgtttcgattcttcagaagtgatgaatggttatcgtcgtggtgcatatcaagatatcaccaaagatttaacaaatgaggaaaaacattctaaagctatgcgaaatgttaaaagttcagattggctttctgaacacttcggtgtacgtttccgttacaacgctttaggtgatttaaacactcaaaatattgtgtcatctagtgacagctttggtattactgaaggtgtacattctgtatcaatgcatgctggttcaactcttgccattacagatcctacaaaagcaaaaggtattatcttcttaccggaccatttgtctcaaaaacaacgttggtctcatgcagtcgatcaaggtatttacaatggcggtggtatcgcagaaggtccttatgttgctatctcaaaagtaggcaaaggaaaagcagccttcattggagattcatcattagtcgaagatagtacacctaaatatgtacgtgaagataatggaagaactaagaaaacgtatgatgggtttaaagaacaagataatagtaaattacttgaaaatattacaacttggtttggaaaacaagatcatacaccgaatttaaaagaaacaggtattaagttagatcaaccaacaccattacttaactttgaacaaccacaacattcaactgaacctgaaaaagaaccatggtcacaacctccaactggttataaatggtatgaccgttcaacatttaaactaggtagttatggcagtacatcatcacaactaaatagtaaacatagaaatcatggtagccataatgataataacaaagcgaatagtacagaagacaatacaactgaaaacaatcattcacaagaggatacgaatacatcacagtcttcccaagatacaactacttctaattcaatgatttctagcaataatgttcaattccatttaccagataatgtatcagtgaatcaaccatttaatattcaagttgaattaacaaacatggctaaaaatacaactattgatcatttaaaattaggtatttatcaagatggtggtagacaacttgcacgtttttctcaagatgggcaaacttatgatacggtaggctatagtcaagaacaaagtgtaaccactgatgatcaaggtaacgcaacgttaacttttacagctaaaacatctgaacctatttcgggtgcgaatattcgtttaaaacaaggtagtaaaacgcttgctacaggttcaattcaataatttataatagtaatacaacacataagagataataaaggtatgtggcgttcaataaactacttccctttttatctctttatttatgaaaggaaatgacctatgacacaactctctttttatatcgtaagtgatatacatggctatatttttcccactgacttttcaaaaagaaaccaaaatcttcctatgggactattaaaagtaaatcaacttatcgaacaagaacgccaacaagatgattatagttttaaaattgataatggtgattttttacaaggttctcctttatgccattacctagcaactgaagaacaatcaagtcaacctcttactgatatttataatcgtcttaattttgactttggtacattgggtaatcatgaatttaattatggattaccttatttacaaaatactttaaaccatcttcatcaccctatcttgtgtgcaaatatttttgatcacaataacgcacctttgactggtcaaggcgtaagttattttaaacgtggcgatataactattggcgtcattggattaacaacacaattcattccaaattgggaacaacctgcccatattaaaggattaacgttcaacagtgcagttgaaacattaaaatgtattttaccagacgttcgtaaaaaatcagatgttgtcgttgtgtcttatcatggcggttttgaaagaagtcttgatactgatatacctactgaagaattaactggagaaaatgaaggatctgatatactagaacgtttccataaagatattgacgtgcttataacaggacaccaacatcgtgatattgcaatgataaaaaatgacaccgccattatccaaccaggtacacgaggtacagaatttggtaaggtgacattaacattagattatgaacatcgaattacagataaacagagcactcttgtatctgtgccttctcatctttcattaacattatctaacaacgatcattcacttttaaatgaacttgaagattggcttgatacggacattacaacattatcagaaccaatgctagtcactcatcagttcgaagctcgaacacaccctcattcacttattaatctgataaattatattttgttagaaaaaagtggtgcagatatagcaagcactgcgctatttgattcagctaaaggctttaatcaacaagtcacaatgcgagatatcattaataactatccttttcctaatacattccaagttttagaacttaatggcaaaggaattaaagctgctttagaaaaatcagcaagttattttagtgtaaatgacaataatgaaatcacagtcagtgacacatttttatctccaaaacctcaacattttaattatgatatgtatggaggaatctcttataccattcatgctggtgcacctgtaggacaacgtgtttcagatattaaagtcggcgcttcacctttagaagacacaaaaacgtataccatatgtgtgaacaactatcgtgcagttggaggcggagattataaaatgtttgcagaagcgccagtcgttaaagatattcaagaggaaggcgcacaagtattaattgattatatgatgaaacacgatttatctcgtattcctcaagttgtcaattttaaggtaattatttaacattcattttacattttataaaaaagcgttctaaattgagtaaattcaatttagaacgcttttgattaatgatcaaatgtaacatactttttttcataaaaatgattaattgtattaattataattcctaagataatgatcccgcctgatacaaatgtaatcgtaagatatgggaatcccattgataatagtattgatcccacaatggcacctaaaaagtttgcaatattaaagactgaagctgcaagtgtacttgcaagtaacggtgcctcatgtgcacttaaaatcactttactatttaatagaggcgttgtaccgaaagtgccgaaaccaaataagaaacaaataataattgctaaaatcgcactatgcactgctgttacaaataaaacaatcgttataaataataacacaaaggtatagaacaagtactgtgtaagtttatgttctggtacattacctgtaagcaagttaccaaccacaccgccaaggccaaacataaataaacatacagttaaaccaacaattccaaatggtgcatatttatgaatcattggttccataaacgtataagttgtgaatacgcctgaataaccaaagacaataattgccattacaattaagatatgtgggtttttaaatacttttaattcttttttcacactagcttctgtactcaaagcgacatgaggtacaaacttcatcattcctaacatagtaatgacagctaacaaaatcatgacgccaaagacaaagcgccaattcgcaaatccacctaaaaatgaaccgaatggcacgccaatcatcactgcaattgttaatccggcttgaacgagagcaatcgcttgtggttttttaccacgaggcgcaacagctgcagctacgctcatacatacgccaaagaaaggcgcgtgcatagaggctgacaataatcgagataacagtaatattggaaaattcggtgctaacatccctattatattacttataataaaaatggccaccaatactgggagtaaacgttgtgcgcgcacttttagagtaaatacacgcattaatggaccgattaatgcaacactaattgcatatacactaattaataaccctgcactcgaaataggcactttcatatcgcttgcaatttgagttaacaatccggtaacaacatattctgccattccaactgtaaatgtacctaacataaatatgaagaacatcattctgttatctttcattattgtttcctcctttttctctctaaaaatcatatgaaagatatactacacaaaattatattctctgtgaagagatttttttaaattttttatttcttaaaaatatagtaatgacaagttttcatattttttcattatgttaaaattaagacaacttcaaaaggcttaactaacgttttatataacctaatttctattaatatatatatttatattcaatgtattgaatattgtattttataaaatatttttcctcggttgacgatgaattaacattaatgccacaacaacgcataaacctcctaaaattaaatgaagcgtgaagggctctcttaatcctataattgaaaatagtgtcgaaaatagtggtactaaaaataagaaactactcgccgtagttgcccctcgttggcttaagctatagacccataatccaaatgaacctacagaagctggaataataagccaaaagaaccatatccatccccaatgattaagcgaactaagtgtataatgttcttttaaaacgagactcattatcagcataaacataccaccgaataatagttgccatcctgttaaaacccagggtcctttatcaaacactaccttttttgtcactattgtattgattgaccaacataatgaaccagctagtgcaaaaagcgttccccatccaaataatgtttcatctaatccgagacataatcctactccaaacacaccaagtataagtgaagtaattttaatttttgttaacctttcatctaaaataaaatgagctaaaaaggccagccatagcgggttcgtaaataatagaatagatgatatagaagaagatacgccaaatgccattgcaaaatttaataatcccatcgtccctgctgtttgtaaaaatccaataacgaacactaatataaatcctttataactatttcctttacttgtgggtagaatgcccctttccccatttctcataaatgtaaggattaacatcatacatcctgcgataacaaatcgccatccaccaagaagcataggtggaacatgttcatttgaaattaaatatttgccagttggaaaagatgatcccataaaaatagtcgtaaaaagaatggacatataaaatgttattgaagtatttaaatgttttttcactgctgtcgtctccctattttcaattaaagataattgagatatattttgtctttaaatacaattatataggaaccactttattttttaaatataatataaaaatattatataataggtttgataggaggcttatatatgaaattatctaccggttgggaacaagcaatatatgtcttattaattttaaaccagctccctcgtcagtcagtaatgacatctaccgctttaagcaagcgacttaaagtttctgattcttacttaaaaaaaatagtaaaagcattagtaaaagaaaatttggtatattcaacaactggtaaaaatggaggatttacacttagaaaaaaactcaaagatattactttttacgatgtttttttagctattgaaggtcgtggcaatatcttctcaagtcaacatttacttaccaactttttaggggaaaaagaaggacacaaagcacaacaatgtaacatcagtattgctttaaatcatattgaacatacattgatttctacactttctaatataaatttagacgatatatatcaagatattatcaagctttataatcttgaagacattacacagtggatagtattaaatagtaagacgctttagacgtccgaatgtctaacatcagacaaccgttagtcttgcccgaacttactttaaacactttttgacaaatatatttgtcaaaatgactatgataatatacactgattgtgaggagatgatgatgattgcgaaatcgattgaaagaattacgagcaagagaaggttataatcaaacgcaacttgctaaaaaagcaggcatctcacgtcaaactgtatctctcattgaaagaaatgactttacaccttctattttaactgctataaaaatagctcgtatttttaatgaacctgttgaatctatctttataattgaggaggaagatttatgaaaataggtcgttttataatcactttgttaattggcggactgattggaggatgtatagctttattcattgactacaaccatagctttcacttctttggaaattatcattatgctacacattcaaatgtcattttaatctcattaatctgtgtggcgcttatcctagtcttaagtatgtatttaattatgattcaaaaaaaagccgttcattacaaacgtttatccgaaacacatattgatgaagatgaagcagattcatatgataagaaagctaatttagcatatatgcaaaattcatttatttattatctagaattaacaattagctttattgctctttttatcattgtcttaggaaatggaaattctagtgctagtagttgggcattacttccttttatgacaacgattatttcctcggtaattacaggattattttatcgtaaatttgattctcgctatcccaaattaggagaaaaaaattatgctgagaaattaattaatattttagatgaaggagaacgacatatttactttaactccttgttcaaaacattctatattaacctatctttaattatgattggtgcaatatttttaggcttttattcattagaaactggccattcccaaacattagggatctttattttaatcattttgtttatttataatggatttagtcatttattaaaaacatataaattttatcattcatagttttcatttctataaagaaaggatcattagatgacacatttacttcaagtacaacaacttaataaatcgtataagaattcaaatttcgaattaaatgatatttcatttactttaaatccaggtgaggtcattggcttaattggtaaaaatggatcaggtaaatccacacttattaacacattagtgggtaatcgatttaaagattcaggagagatttcttttttcaatcaaattatttccgaaaaagataaagattataaagagcacgtgggtgtagtttttgatgatttacgtgtaccgaataaattgacaataacagagattgataaagtatttttaaatatttttaaacattggaatagtgatcaatttttcaatcttattcaaacatttgaactacctaaaaataatcaaatttctactttttctagagggatgcgcatgaaagcagcattagccatcgcactttctcatgagacaaaattattaatcttagatgaagcaacagctggtatggatgtttcaggacgagaagaagtgttagaaattctcgaagattatgtatcaaaaggacatggtattttactttcatctcatatttctgaggatatggaacaacttgctacaaaacttatttttatgcgcgatggtcatattcttttacaagaagacaaacatatattactaactgattatggcattatcgaaacagatgaaacatcccctttagacttacctcaagaggtaatcattgcttcacgaatacgtcatggtcaacgtcaaacgttagtcaagcaacgtcaacactttgaacaagcacgcccgcttcaaaatattgatgatgctacaaaattaattatgcgaggtgacaaataatgaaaggacttatacttagtagtttttatgcttctaaaaaacctctcataacctatttaattattggtatcgtattaagtattgtgtttgcgttttttagtccaatgatgtgttgtttcatgctaatggtcatgttattatctcccgtatcagataacttaaaacgtgaaaaagattctaaatggatgtactatgtatctacccttcctacacatagaaatacttatgtaaaagcatactttgctttttatggtttactcattttacttggtttaatgattggcgccatcatttgtcttatcgtgactcaagatattatggttacattattttcagcattcataggtattgggatggcttgtacgtatgcattaatgtttccactcacatttaaatttggtcctgagaattcaaatgtcattatgcttactacagcagttgttgctgttgcgttatttttatccatgtggttctttgctattatgccaatactcataaaagcaggttcaatgagtaaaatcgcttcaaaccccctcgttttagtagcaactggtagttatgcattgcttggtgttattatttttgtcatttcttatttttcatcactatctatttttaagaaacaagaactataatcacaaacgtgtgttcgtttaagaacacacgtttgttctattttatattttgaatacataacaattaaggaggaaaaactatggatattaaagcaattgaagattatttaaatattgagtctcaacgttatcctcaacctactttagatgcacttaactattatatggaacgctttatgctaaccgttccttttgaaaatattagtgttcaaaataaagaaaagatttcagttgatttagattatttatttaataaatttatatatcaacatcggggtgggttttgctatgaaatgaaccacttcttcggtagctacttagaagctaaaggttttaaagtgtttcgaatgtcagcaaccgttcatcagcttaatggcaactacagtcctaaaggctctcatttatcactggttgtgcttattaataatggttactatattgctgatgtgggatttggcgatttaccattacaagcactcccaataacttcaattgaagcgacacaaattgtgtttgaaaagacaggtcaatttcgtgccatttttgaaacccctacgacatatcttcttcaaaaactggaagaaacaacgtgggtaacacgttataaagcagagtttatttctcatgatattcatgattttgatgaaatgattaactacaatacctcacatcctgaatctatatttgtaaagcaactcatgattacaaaaccacaaaattttggtcgagctacgatgtcttatcatcaccttacccttactaaaagatataaaaaagagcaattcgctgtcacacgtgaaaattataaagattttttaaaaacctattttaatcttgacgttactattcttcctttagaaaagtgaatacatttactactgtcgcgtaataacaacaatgaggtgaaaactatgtccgatatcgaaattattgggcaacacaaaataacttaaaaaatatttcaactgaattccctaaacatgcgatgactgtagttacaggcagtgctagttcaggaaaaagttcacttattaccacagcttttgaacaaaatgaagatgctatattgattaatcaaaaacctgtacacgtatcaaatcgttctaatctactcacgtatttgaatatttttgaaggtgtgagactttttttagtaaacataactggtcttaaaaaaagcatgttcagtactgaaaaaatatttatctttgatgaacctacaacaggacttcatgaagacgatttgcctattctcattgaatgctttaatcatttgattgatgaagggaatactgtcattttaatcgaacataatttaacgatgatgacagaagcagattggtttattgacattggaccatttgctggtgaacatggaggacaattattgtatgctggagaccctaaagggcttctaaatattaataattctgttacagcaaaacatttaagacgatatattgaataatcatgatttaacccccgcatgttctcgaacacgcgggggttaacatttacctacacactattataataatttatgttgcgtcaagagttcttctacaaacgtaccttctatcttttttaaaaacgtgtgtaatgcaacttgttgtattttattttgcttggctattgtttttaagtctttacgatcattaagttcatagactgcatctaataagacacgaatatcaaattctgtcgcaatgacttctggaacacctctatctatgtccagtaattgataaactgcttccatcgctgttcttacagaatattctgtagtaaacactgtatctctttctgtttctgcaaagttaccaatgaaggctaagttacgagagtgttgagggacaacaagtggtcgatcgccaatcgatcttggcatgaaatatgaacaaatgtaaggcatatatacaggaatcgtattacaatgttgtgttgcgaggcattctatttgatcaataggtaatcccatatgatataaccattcttgacatatttcatgaccactacattcaacaatcggtttatggatataatcgcccttctcatctgaatataaagcgtaaacccatacactcacttcatctttagattgttctttgaattgttgttgacgattcacagtaaaactcatttgccatttagagtcgttaactgtgataatcccacctgttaccgtttttcctgacaatggatcacgtttacataaacgttcgatagcttcaattactgtcttattatttgtcgttaccgttgctgagacgaaccaacttttatctggcaaatctttatagaatttttcgggattgccaaactcagggctttgtttagctaagttccgccataaattccaacttccgccaatgtcttttgtaggaggcgcaggtgtgtcattatcgccataagttgaactttctgtgatactaccattcgtaataaatacaagatcatcgggtgtgagttgaattgtttctttattaccatttcgttttagttcaattgttttagcaactttgtctttggtagtcacatctactttaacatcaagcacttgaacattgtattcaaattgcacaccatgggacgttaagtatgcaatcatagggcgtacgagtgattcatattgattgtatttagtaaatttcaaggcactaaaatcagctaaacctccaatgtgatgcacaaatctcattaaataacgacgcatttccattgcagaatgccaaggttcaaaagcgaacatcgtcttccaataaatccaaaagtttgaattcatgaaatcctctgacaagacatctgaaattttcacatcatttaaatcttcttctttcatcatacataattggagtatttctttcatggcttgttttgttaaagtaaagtctccatctgtaggtaatcgttgacccctttcttcaataacacgacatcttgagtagtttggatcttctttatttaaccaataaaactcatctaaaactgaagcatcttcaatttcaagtgatgggatggaacggaacaaatcccataaacactcaaaatgattttccatttctctaccaccacgcataacgtagcctttcattggaagttcagtaccatccaaacttccaccagatttagataattcttctaaaatgtgaatgtttgacccatccatttgcccatctctaattaaaaaacatgcagcagctaaagatgctaatccagagccaataagataagcagatttttgtgcaacatagtcaggttttttcggacgtgcaaatgcttcataatttccattactatagtacatatgattcactccccattttatttatatttttaagtaatctatgaaaagtagtaaactataagtaaacgctttagaaattaatctacccttcgcttatattataatcattttataaaatattattgtgagtcagttaagtgaaaatgtaacttaagtgacatttttgataaaatgtcctaaatgagaggtgaacagcatgaataatcaagatttacgtgtacaacgaacaaaaaaagcactcattactacattctcagatttgcttgaaacgaaatcttttgaaaatatcaccattcaagatttatgcgaaaaagcaaatgtacgtcgttctacattttaccgtcatttcaatgataagtatgatttacttaatcatattgttggtacattaattgaatattttcgaacgttacatttgcctgaaattgatccaaaagatccgagacaatttttcaataaatttatgaaagatattttatttttcattagtgataacaaaacaatggtaaaaagtgtcatttctatcaatatttatagtgaagtttatcaaattttatataatcaaatttatgcagtggttaaacgacaaattgaatttgataaacaaattggacaattttacatagatgagttcatttatggagaatttctaactggaggcattttaagcgttattctaaactggattcagtatggccaacaatccattgatgaagtgtcttcagatatcgttaccatgatttgtggagcaagagaggttcatttaaagttattaaaataaaacaagagcggaaaacaatatcgtactgacttattaaattgtttgatgttaatctcacatttaatagtacgttaaagtttatcccgcttttatttagaaccatttccatacttttttagcatttactcgtggatacgtcgtttctggtaagaaatcacgtttgtagtgcacataggcttttccatctttattgattcgtatatcccattttttattatctttaggaacagtatcatataaatttttatctactttatatgtcttaccgtcaatcttatgttctcctttagataacacttttttgtattcatattctttgcgataatgtttaaaaatcgcattccctattcgattacgattgtatttggcattattatccatatacggtgccacattcataactacttcattgagtcgaaggtgattctgttgattagttaaagcaatattatatcctttatcactcgtacccgttttcaatccatctgtaccttttaagtaaagtggctcatgtttaattgataaattagtattgttaaaagtataacctttttgagtatcttggctaagttgcgttatgtttaaaaattttggatgtttggcgattaagtgatgagataatatcgcaatatcttctgccgtacttttaggataaatatcctgtttatatttctttggtgcttgttgtccaagtaaatcattagcagcacctgctgggttcacaaaatatgtatgcttcatatgaaaagctttagcttgcgcattcattttgtctgtgaacgttgacgtattgccactcacttgttctcctaaaatcatcgcggctgaattgcttgaaggtaaggccgcctgtgttaataaatctttaatagtatatatttgaccttgatttaaagggacagacgttaaatttggctttttagataattgatcatatgcgctcgtgattttaactttatcatctaacttaagttttccttgatgaactgcttctaatgttaaatagatggtcatcattttagacaaagaagcagggtccgcttctttatttccttggaaattatataatatttggccttgttgtgtcgtaagcgttacaccatcaggttcataatttgaacttactgcgacattaccttctttatttgtaatatcaacaggtgtttctgctgcatgagagattgaagttcctaataatgtaaataaactaagtattccaatactttgtgttactttcaaaaacattatattacctactttttatttttaaaatattgtataatatattttataacaactttacaggcgaattacaactaagtatctaatatatattctttaattataaaataaagaagagttgaacaaatggtcttacgaagtttgtccaactcttttgtttataccatactattgataggatttatctcctttaaaatattgacgatctttctcactatacaccttactcggatctaaaaatggctttaatttatatttaaaatcatataaatttaatccatcaatcgcaacacgatcttgatagacactatcattgccgatatctgtaaaattatttggtcctacacctgctaaaaatttaaatccttcatcatgaaccagatattgatatgctttagaacctctatcttgagcaccatgtggatatataaataaatctgtttttcctataattggctctacttcttttttccaacgtttcgtgtcacgaacaatttgatgatatgagctatttgcaaaatcgatatgtccccatgaatgacttgcaaatgtccaaccatctcgtttcattgctttgactactttttcagcctcttttttacgttttgggtaatctttattatttaactcatttgttcgataacctaacacgccattatatcctgttagtgcaacgacgcctttttgaccatggagtgaaaagtcaggatggtctttcacgaattgattcaatataggtacaatatcatttgtttcacttgtcgttaccttaccatttttatctttagtttcagaaacgacgtgttgtttctgatctagcactaaacgatctgcatatccatgacctctcatgtactcataataattcatatcatcaatggataaaattaatggtttcttacccttaggtaattttaattcttttttagtaactgtcttcccttttaaatcataagcctcatgtggatctattaatatgtaatgatgtttataaagttcatttaatgaacgcttaaactcatcagctgtaatcatccaatcaaaattacccttagcttgattcttctcttgtgtaaaggctactttaggttcagtaatcactggatgataaaatacatgtgcaacatcaccttgatacacttgccaatcttttttattctgagtactttttttcgcatacatatttgcaatgttttctttattctttttagtgtctttctttgatgatgacaatgttgaaaattgacatgcacataaaaatatagatattaaaacaataagcgtgctaagtaaatatttcttagtcatatagttactcctttaagttatagaaatattataatgccttccaacattatataataattttatattatttataatagatgttgattaacttttgaatacgcttattttaaaattgacttaacacgtttatatacaacaactacatatctaaatctttagcgatatcatttattgtaggcataccaccttgtgcgccaagtgctgtaactgaatgactagcagcgacattagcaaatgcaatagctttagcaagtgaatagtctttttgtaatccgactgcaagcgcaccattaaatgtatcccctgcccctgttgtatcttttacttctcgttcaataccttgaatttcaacttgttctataccatcgtaaaatacagcgcccaatgcaccttgtgtcacaatcagtttatcaggataacgttctaaagcttgttcaatgtctccttcaaacatattttcactttcagtttcatttggtgttaagtatgtcacttgttccaatatatcatctgaaatgtctctatatggagctggatttaaaatagaagtgagttcatgttcatagcaataatgaacagcgtgagcgacaacatcagctggaatctcttgttgaagtaacacaatatctcctttatttgcttttgacaaagctgagtctaccaaagaaactgtcactttatgatttgctgaagggacaacaataatactattgtcattatcagctagtgtaatgtgtgcggtacctgaaggtccttttactttttttacatattcaacatttacatgattatgctttagattttcaagaatttgtttacctaacatatcatcgccaatacaccctaccatgtgaacatggtcacctaatcttgctgctgccactgcttgattcgcgcctttaccgcctggtgtagtgaaaaatgtatttcctaatactgtttcacctttacttggcacttggtcagtcgacacaaccaaatccatcgacatacttcccacaacatatatacgtttcatattaaccctctcctttttctttctcatccatatcatatctaaattagcataaataataaaaaaaagagtgagacaacacatttaaaaagaaatgcggtctcactctcattaatatgttctaacttttaacttcatgctgctctttacctgcaaacatcacaagccacgttgcaaaaataaatggagcggtgaaaataggaagaccaattggggctaatgttgtagctaatgcaccatgcatcactactgttaataataaaccagtaatcactgcaagaatcggattgaattttgttttaaacgtcgcacccaacgcaatacccgttaatattgagttatagccgtacaatccatcagtaatagtaggatagtctccacctagtaatgtgatacatatcactgctaaaatacttgatactactgcatagatcccgccttttactgaaccaataaaaataccaatcataattaacagactaccaatgattgatgtcactaagaaaatttcactaaagtttgtaatgataccgctaataaaattcacatgtgaatgactgatgtctggatgtttaattttagtaggcaaaatatctattgtgatatgcatttttgaaaattgcatgcccattgctaaaattaaccaagtcataaagacaaatggaaaagttaacatgggtagaccatatggttttaaaatttctcggattgcagctccaactggtaaagtaagagtggtcgccacaataagtacaatccagttcattaaagatacttctaagaataatgctaacccgattgctgttaatactgaattgtatccagctaatccatcatggatttcatcctcactataattaaagtacggcgctagaacaagtgcaatgagacttcccactgctgcccctaatccaactttccaatttgcaataaataatcctataagaatacacagccctgaccatttattattcataaatacgacttgagcaatattttttaagaaaatctctacatatttcataaactcacctttattattttattcatttcctttctaattattataccttttaaacacttttgtaacattaaaaatatatacaaatttaatttaaaaagtgattttaaataaatttaaaagataaattacttgttaaaaatattctacagttttatgattaatgttgcagtacttatttttaaaagaaagaaggtataacagtgcattttactcaacgggaacaagataaattaatgatcgtggtagctgctgaagtagcgcgtcgacgtaaagcacgtggcttaaaattaaattatccagaagcattagcacttattagtgatgaattactagaaggtgcacgtgatggtaaaactgtagctgatttaatgagttacggtaaacaaattttaaataaagatgatgtcatggaaggcgttgatagcatgttgactgatattgaaattgaagcaacattcccagatggaactaaattaatcactattcatcatccaatcgtgtaaggaggatttttaaatgaaacctggtgaaattaaaataaaaaatacagaagttgaaattaatcaaggtcattttgaaacagtgatcaatgttaaaaatactggagaccgtccaattcaagttggttcacatttccatttctttgaagccaatgaaggtttaaaatttgatcgagaaaaagcatatgggaaacacttagatattcctgctggtgctgctgttcgttttgaacctggtgatgagaaaaaagttcaactcgttgaatatgctggtaaccgtaaaatttatggtttcagaggtttagttaacggtgaaattgacgaagatcgcgtttatcgtccaactggtgaaaatgatgaatatgctgcgccaaaaggtgataatggcgaaaaaaatgtgaacaaaatgggaggtaaacagtaatgagctttaaaatgactcaatctcagtatacaagtttatatggtccaactgttggcgatgcagtacgactaggtgacactaacttatttgcaactgttgaaaaagattatgcaaattacggtgaagaagcaacgtttggtggcggtaaatctattcgtgatggcatggctcaaaaccctaacgttacacgtgatgaccgcaaagtggctgacttagtattaacaaatgcattaattatagattatgacaaaattgttaaagcagatatcggtgttaaaaatggttatatctttgccattggtaaagcaggtaaccctgatatcatggataacgtagatattattattggttcaacaactgatattatctctgctgaaggtaaaatcgtaacagctggtggtatcgatacacatgttcactttattaaccccgaacaagcagaagttgcgcttgaaagtggtgtgacaacacatatcggtggtggtacgggtgcatcagaaggtgcaaaagctacaaccgttacacctggaccttggcatatccatcgtatgctagaagctgctgaagatttaccaattaatgttggtttcactggtaaaggacaagctgtaaaccacactgcattaattgaacaaattcatgctggtgtgatcggtttaaaagtacatgaagactggggtgcaactccttcagcgttaagtcatgcattggatgtagcagatgaatttgatgtacaaattgctctacatgctgatacattaaatgaagcagggttcatggaagatacaatggccgctgtaaaagaccgtgttttacacatgtaccatacagaaggtgctggcggtggacatgcgccagatttaattaaatctgcatcgtatccgaatattttaccttcatctacaaacccaacattaccttacacacataatactgtagatgaacatttagatatggttatgattacacaccatttaaatgcatctatccctgaagatattgctttcgcagactcacgtattcgtaaagaaacgattgcagctgaagacgtattacaagatatgggtgtatttagcatggtaagttctgactctcaagcgatgggtcgtgtgggtgaagttatcacacgtacatggcaagttgcacatcgtatgaaagaacaacgtggtgctctagaaggtgatactgactataacgataacaatcgtattaaacgttatatcgcaaaatatacaattaaccctgcgattacacatggtatttctgactatgttggatcaatcgaaaaaggtaaattagctgacttagttctatggaatccagctttcttcggtataaaacctgaacttgttgttaaaggtggattgattaactcagctgtgaatggtgatgcaaatgcttctattccaacatcagagcctatgaaatatcgtaaaatgtatggtcaatatggtgcaaataaacaacacactgcgattacattcgtttctaaaacagcatacgaaaatggtatttataaccaactaaacttagaacgtatggttcgaccagtccatggtatccgtaatcttactaaaaaagatatgaaaaataacgatgcaacacctaaattagatgttgatccacaaacatatgaagtatttgtagatggtgaaaaaatcacaagtgaaccagcaactgaattaccattagcacaaagatacttcttattctaggaggtactcagatgatagtagaagacattcaaggcaatatcgctaacctttctgcagaggaaaaacaaaagcatgtagaaaaagtatatcttgaaaactctgatctggttaaacgtattcaacgtgtcacaacagatcacggtaatgaaatcggtattcgtttaaaacaacctatcgatttacaatatggcgatattttatatcaagatgacaacaatatgattgtagtagatgtaaactcggaagatttacttgtcattaagccgcgtaacatacaagaaatgggagatattgcgcatcaattaggtaatcgtcatttacctgcgcaattcacagaaactgaaatgcttgtacaatatgactacctagtagaagatttattaaaaacgctaggtattccctatagccatgaagatcgaaaagtgaataaagccttcagacatataggtcactcacatgattaatcattcacatttacgactatttcagttctgtgattcacaattccctactggcgcatttagtcattcatttggactagaaacgtatattcaacgtcagacagttcatgatgctacatcatttagagaatggttagaactctttctaaatgagcagttaacctattcagatggccttgcaatgcgtttagtttataacgctttaaataatggtgatacagaaaaagtattacaccttgatcaattaatttatgtccaaagtttaccaagagaaacacgtgtaggtactaaacaaatgggtacacgtatggtaaaacttgctatagaactttatgatagtccatggattaattggtatcatcaacaaatgaaagataaacgtgcaaaactgcatccagctatttgttttacaatgctaggacattatttaggcgtcgatattgaaacgattattgattactatctatatcagaatgtttccagtttaacgcaaaatgcagtacgtgcaattcccttaggtcaaacaataggacaacaagttgtgacggagatgattccacatatcgaacggacacgacaacacattctcacattaagcgaagaagatttcggtttaacagctcctggcttagaactgaatcaaatggagcatgaaaacgtaaacgtgagaatctttatttcataggaggtaatatacatggcaaatccaattaaaattggtgtaggcggtcctgtaggtgcaggtaaaacacaattaattgaaaaacttgtacgtcgtctatcaaaagatatgagtattggcgtgattacaaacgatatttacacaaaagaagaccaaaaaatcttagtgaatactggtgttttaccagaagatagaattatcggtgtggaaacgggtggctgtccacatacagcaattcgtgaagatgcatcaatgaactttgctgcaatcgatgaattattagatcgtcatgaggatattgaacttattttcatcgaatcaggtggcgataacttagctgctactttcagtcctgaattagtagatttctctatttatatcatcgatgtagctcaaggtgaaaaaattccacgtaaaggtggacaaggtatgattaaatctgattactttatcattaataaaacagatttagcagaatttgttggtgcatcacttgaccaaatggcagaagatactaaaacatttcgtggcaatcgtcccttcacatttacaaatttaaaaaccgacgagggtttagataatgtcattgaatggattgaacgcgatgcattacttaaaggattagcttaatggtacaacatcaattcgattcaaaaccttcttggactggacaattgaatctcactgtttttaataatggtgagcgttctgttgcccgtaatatctttttcgaaaaagcgttaaaggttattcgtccaatttatttaaatttttctacgattccaacattttatatcgtaaatgttggcggtggttatttagatggcgatcgttatcgtatggatattaatgttgaagaagatgctaaagtcactttgacctctcaaggtgcaactaaaatatataagacgttaaacgattgcgtgaaacaataccaaacattcaatatagcaaaagatggttatatggaatatgtaggagatcctattattgcttatgaaagagcaaagtttttccaacataacgtctttaatttagataaaagtgcatcaatgttctataccgatattttaaccccaggctattctgaaaaagacacaccattcacttacgactacatgcatttaattaatgaaatttatgtagatgatgtgcttatcacctacgataatttacgcatgcacccaagtgaaacaaaaatgagttcgattggctatatggaaaactatacacatcttggttcggcttattgtatacaccctaatataacgcaaaaattcattgaagatgtgtatgatgaaattaaagattatacaaagcaatacgattgccgtattggtattacgcaattacctacacatggttttacagtacgtgtattatctaatctgacacaagaaattgaagaagtgcttacacgcgtccaagcttatattgctgataaattgtatcatcgtcaactcgactttttaagaaaatattaattaaaatacaccttatatcatgagtataaagactcgatataaggtgttatttttttatacttatttttctattttatttattatcattaaatatatattgatagatatcatgcgaaacttgttcgaaatcgtcaacattaagtgaaagatagaatttgagtttaggctctgttcctgaaggacgtaatgcaacaaatccctcatcaaagatcaaccgaatcacatttgactttggcagagatatcgtttcaattttatcatcccgtttattgattctcttttgactttgatagtcttcaactgctatcacttttaatccgcccaacgtatctggaatgtgttgacgaagatgttccattaacgttgcaatctcttgttgacctttttgcccttcaaatactttagatataggttggtcacaataatatcctatttcttcgtaaatgtcagttaatgcatcgcgtaaggttttgccttcattttttaaaattgacgcatatttgatcacaagtggcacaatttgaatggcatctttatctctcacaaaatctcccgcaagataaccataactttcctcgtaagcaaagataaacgcttcatcgttatttaattcgcgaatggccttggcaataaatttaaaaccaattaagacttccttcacagtgactccatgttgctttgcgaaacgttttcctagttcaccacttacaatggattgaatcatgactggatatttaggaagcgtcgtatgatcaactaaatatttaatcattaacgcaccaatctcactaccattaaaatagtgaatatgaccatcatgatctcgttcaacgaatcccattcgatccacatcaggatctgtcgcaatgattaaatcagctttagagtattgggcttgtttgatagctaaatcaaacgcttcatgttcttctggattggcgctttttacagaactaaaatcaggatcaattttacattgtgagtcaacaagttcaatgttattaaagtgaaggtggcttagcaccttcggaataataggtgttcctgtaccatgcaaactcgtatacaccacatttaagtttgatggaggtatgtcaccaatcaattggctaatttccgaaaagtagtatttattaatctcttctggtaagggtaaaatattttctttaattaacgcctcatttaattcaatttctaaatgaagtggatcatctaattgctcaatataattagccacttcaagtgaggcgatatcatcgagctgtgctccatcagcaccatacactttaatgccattatagtctttaggattgtgactggctgtaatcataatgcctgcagatgtttgaagaaacctcactgcataggataattgaggcgttgtttgatatgtatctgataaatacacttttatatgatgtgttgctaaaatatgtgcgataatgtctgcaaattctgctgataaatgacgaatgtcataatgaatgacaatggaaggttgtgccatattatcttgtaaataatatgcaattcctaaagctagacgttgaatggtatatcgatttaaacgtcctggacctaaaccaaattgaccacgaatacctgctgttccaaaggaaagtgtcgtttcaaacccttcttgttgaaattgatatgattgttggtcatagaatgttcctacgagactatctgctttatgtgttatccaattgtctttcatccaatactcctctcatacatgatgtatgtcctattcttttctttagtataatcgatatctatttatgtttcacatgatacttatctttttttaattaaaatcctatctacaataatacaattcaaaaacaccctcactacgataagtaaggatgtttttaattgtaatttatagctatttacgattgaaattgatagctttcatgtcctttagcgaaaccttctactgtataaatcattgatccaccttctgaattattctcaatatcattggtacatattaacaattgatttgtacctggaataaattgcggatgcgtagaacgcaacattttcccttcatcacgacctggcatcaagatttgaccaataggataccctcttttattaaagacaagaactcggccttgtccatacattgcaacatataagttgtcatcactatcaatacaaacagaatcaggtccttcatgaccagtaaaataatacggtatggttgctccaaacggtgcaatagtcacaccatcatcttctaattgaatacggtgaaggcgattcgtcgttgtttcagttatccacagtactttttcatcagtactaagtgcgataccattagcaacagaaatattttgtatcacgggtgtcaccgttttaaaatcaggagaaacgtagtagacgccacctttaggattcgttgaataccctctaaagtcggtgaaataaaaaccacctttactatcaaataccatatcatcaatacaataatctgtattgatttctgaaataatgtcttcaaagtgttctccatgttcatctgttgcgaaaataccacctgtagattcaaagtcacctaagtaacatgtaaacaatcgtccatctttatgaatttttactgcagctggattttgtttttctgattgaaacgctacagaaatatctttgcttggtagattaactttgaaaatctttccaccaaatacttcacataaaaataagttatgttctctatcaaaaataagtccttcaagttgaagtccttcatctgaaatttctaaccatggttcagctgtaactgtttgtaattcactttcagaaacaataggaactacacttttagatttaccactatacgttaatttaggtaatttattatccaacatattaaataagcctccttatgtcattcatttacatagtttattatacgcttgaaacattctaaacttaagcttactatatgtaatcgatttcaataagtaaaatgattctccttgtataggttaattgactgatttatgagcgcaaatattgaaagaagttataattttgttaaaatattataatgtcgatttttatataaataacaatttagatacgtttaacatacagataaattaacttttagaggagaatcagaaaatggattatagagtgttattgtattacaaatatacaacaattgatgaccctgacacatttgctactgaacatttagcattttgtaaagaacataacttaaaaggtagaatcttagtatctacagaaggtatcaacggtacattatctggtacaaaagaagatacagatcaatatattgaacatatgcatgcagatgaacgttttaaagatatgactttcaaaattgatgaaactgagggccatgcattcaaaaaaatgcatgtacgtcctagaaaagaaattgttgctttaggattagaagatgatgttgatccacgtgtgacaactggtaaatattactcacctagtgagtttaaagctgcattagaagatgatgacactgttattttagacgcacgtaatgattatgaatttgacttaggtcatttccgcggtgccattcgtccagatattacacgcttcagagatttaccagattggattcgtgaaaataaagaaaaattagacggtaaaaacattgtgacttattgtacgggtggtatccgttgtgaaaaattctcaggctggcttgtaaaagaaggctttgaaaatgtaggacaattacatggcggtattgctacgtatggtaaagacccagaaacaaaaggtgagtactgggatggcaaaatgtacgtcttcgatgaacgtattagtgtcgatgttaaccatgtagacaaaacagtgattggtaaagaacactttgatggcacaccatgcgaacgttatattaactgtgcaaatccagaatgcaataaacaaattttagtatccgaagaaaatgaagcaaaatatcttggcgcatgttcatatgactgtgctaaacataaacgtaatcgctacgttgcaaaacactatattagtgatgaggaatggaatcgtcgtttagagaactttaaagatgttcctgaacatattcacgcataatgatatgtaccctttataagtatcaacctacttttaaagggtacttttacatacttactgtgctataataacttaaattgaaacttacataaggtgattgttatgaagaagcacagtaaagattacttccatcttttttatagtcagctattcgcaaatactggagacgtgttaaccgttgtcggcttaatttcggtagtatatagtataacctcaaaaacgactgccgcttctatgattccaattatttttacttccggactctttgttagtatctttatttcaaattatatttatcagtattttactcaaaaacaagtattgtggattttccaagggcttaaacttgtgagtctatccatcatcgcaagtctacttatattcgaggaatctccaatatttatttttattctactatttataaatgctctatttgatggctttaccaatccaattaagaatgcgatgattccttttattgaaaagaaagaatacataacgtcggcaaacgctttaatgaatatgatgagtagcattgttcaattatcgacatgggcattaggtggatttctgatgagcctaattggcgctaaatatttatttttatttgcgcttgtactagaaatcctatcctacttctttattattcaactttcagaacggcatatttataataatgaaaaagaaaatatattaaatagctttaaaactgtattacatcataactattccaataaactgagtttatatctaaatctatctacaattttcgaatctgtcgcaacgtccatttgggttgctgcaattatccttacatatacgagaacatttttacatgtcgatgatttttggtttggactcatcaatgctgccttctttagtgggacgattattgctggattatggataaatggtaaagatcaatttttcacaaaaataagttaccctgttattatttacattccgctcatattagcatttattaatgtcagctttatcctacataaatctgtgttacttgctttactaatttcattattaatggggattttcgaagattcacgctatatttctttaaactcagttgtacaacgtgaagtaccaaaagaaatcctgacctccacctatatactgaataatttattaagcagtgtatttttctcacttggtactttaggtatttcacttgttgtagataatcaaggagtgatgtgggcatatgtaattagtggcgttgcttatgtgttaacatttattttaggtttatattttaaaatagcgattaaaaattaatttacgaggagacgacgatatgtgtacaggcattacatttcgagccagcaatggagatgttatttttggaagaacgatggattacgattaccctttgaacggctttcctgcagttcaacctcgaggatactcctttaaatcgcatgtcgactataaagggaaaacgttatatgcctttgcaggtgctggttctgatatggaaggttttgtttttggagatggcgtcaatgaacatggacttgccatgtcaaatcaatacgatcgtggatatgcgtcatatgcgacagacattcgtgacggctatatcaatatttcgcaaacagaagtccttgtgtgggcgctcggctataacagaaatattgaagaacttattgaaaatgcgaaacatgttaacgttgtagcctattcatatagtgatattaacgaagttcctcccttacattatcatttatctgatgcttcagggcgcactgtggaagtgacatttgttgaaggacgtatcgtagtgattgataatccaattggcgtactcacaaataacccagatttaaattggcattatgaaaatttgaaacactatatgcatgtgacaccatataaaattgataatacattttcaaaacaatttaacttagggaatatgaatggcacattcggtttacctggagggtatacatctggcgaacgttttgttcgcgcagcttatcttgttcatcacttattaccagatagcgatgatcatcctatcttagatgcatttagaattttagaccatgtgagtgtaccaaaaggcgctgttcgcccttctgacaatggattttattatacgttatatcaaactgtctttaatttaacgacaaaaacactctatattaaatattatgactctaataccattacagaattacaactcaccgatgacttaataaatcgtgacgatttggtagtcttttcgagaaagaataaaggattgtatactgaaaaagtgaacggataacatatttttaaatctaataaagtacctctcttacatcaaagtgtaagagaggcttattattttttcacttttatcattctttattttatctataaactagtccaccatcagttaaaatggcttgtccagtaatataatctgaatctgatgatgctaagaatgatactaaagaagccacatcttgtggttcttgataacgtccgagtttaattgctgatgagaactgttcaaatgcttcacctggttttagattactatctagtttaaccatttcagcatcaatacgatcccacatttcagttttagcaactccaggacaataagcattcaccgtaatccctttttcagctaattctttcgctgcagtttgagtgagagaacgtactgaatgtttagtagcacagtatgtacctaatacctcataagattcatgtcctgcaatactgcatgcgttaatgattttacctttactattttgcttaataaactgttttgctgccgcttgaattccaaataacgtaccatatacatttatatggaataatttatccaattcatcttctgtaatatctaaaataggtgataccgcatctacaccagcattatttacaaatacatcaatttgaccaaattctgccaccgcaaattgaaccaattcttcttgctcttttttcttagaaacatcactatgaaatgctaccacgttatatccattctctttaaattcttgttctgttttttctagagctttttggttaatatcttgaatcacaatattaaatccatcattggctaaacgttgagcaattccttttcctaatcctgctgctgaacctgtaatgactgctgtttttgtcataataccactccttttacataattattttacccttatagtttaattttattcttaattttaaataattcacaaactgttcatatatcttttacgttgccttatatcatcatctgtttaatgatgtaaataagtgtttataccttacgtattaaactgtaaaaaattaaaggagatgttctcttatgaatattttagttactgcatttgatccgtttggcggagaaaaggtaaatccggcattagaagcggttagacaactggaccctactattggggcacataccattacaacattagaaatcccaactgtatttcacaaatcaaaagatgtgattcaacatgaattagaacatcatcattacgacgtggtattatcgattggacaagcagggggacgttttaatattacacctgaacgtgtaggcattaatattgatgatgcacgtattgcggataataaaggaaatcaacccattgatgttgccattcatccagatggtgcaccagcctacttttcaaatcttcctataaaatcaatgacagaagcgattaaaaaagcgggtgttccagcaagtttatcgaataccgcaggcacatttgtctgcaatcatgtactttatcaattaggctaccttgcagataagttttatcctaacttacgatttggctttatccatgttccctttattccagaacaagtcatagataaacctaatacaccttcgctgtctttagatacgattacaaaaggaattacagcagcaatcaatgcgatttcagacctccctgatgttaaagtagctttaggagaaacacattagaaaataagaggattagtgatatataagatacaaattctataattaaaacgattctttttatctacaaaatatataattttgtagacgttttttattttcaaaataaatattaccatgtattattaataagtgacaaatataaattgaaagaggttttaaatttgagaaagcatctgcttttgtcattcatgatgtgtgcgtctctcctattaactggatgtacacatgatcaacatcaacacaaagaggtgaaagtatctcttgcacgagaatttaacccgagccagttagatgcacaagcgtttgatgttccgatgcctgtctacagtgcaatatatcaacctcttgttacatatggagaaaatggaaagattgagcctggtttagctaaatcttgggaagtatctaataatggaaaagattatatattccatttaaaacacaacattaaatttaatgatgggtcaacttttaacgcaaaagcagtcaaattttcaattgaacgtgcgaaagcaaccaataaaacgaatcctatggaaaccttggataaactgaaatcggtcactcttaaagataactataccgtagactttcatttaaaaacaccatctaatcaggtattaaatgagttatcacaagtccgcccccttcgtatcatgagtccaaatgccgtcaaagatggtaaaacgacaggtcaatttgaaaaagcgattggtacaggtccattcaaagtagcaaattcaacaaatgagactgtgtcttttaaaccaaatccatattatcgcaaccatcatccactggattacgacttaatatttcaaactattgaagatagcgattcacgacatcttgcgattgaaagtcattctattgatattacagggggttcactaggacatttgactcctcaacaaatcaaggaatcataccgtaatcaagatttaaaggtaaaacaatatccaagtacagaaacacagttcatggcctttaatccagaggtctcattacttcaaaataaaaagatgcgcgaagtaatcagtaaagcgattaatactgatcacttatcatcaaataagcagcttaaaggattattccaagacggcgtagaattcgtgaatgatacaaatcaacacacccattcatataatcctactcaagcgacacgcttattagaacaattaggctataaaaaaaatgatcggggctactttgaaaaaaatggacgagacctttctttaaaattagcgctacaaactgatgaatttcctgaatggaaaacaaaagcagaaattatgcaacaagatttgaaaaacgtaggtattcatttggatattaacgttttagatgcccaaacgtattatgaaacactcactatccgaaaagattatgatcttattttctatcgttcttatacgaatgcgctcatgccatataactttttaaatgcacgctttaagcaagacggagataagcccggtatgttcgcaaacgatgttcagctaacaacaatgcttaaccgcttctcaaccattaccaataaggatgatcaacaacgtgcatttaatcacatctcacatcgcatcaatcaacagtatcttgaagtgccaattgcttatccaaacgaagtgtttgttacaagtcctaaaattaagcaattcgaattctcaggacaaacggatgcacccattaattacgataaattgaaggtatctcatcatgattagtatgattaaacatttacttaaacttatattatatttcattattatttcgtttatcttatttgtgctacttgaacatacaactggaaatccagcgattcaatatctacatgaacatggtgtcgcacaaatcacagatgaacgaattaagatggctcaagataaacttggattaagccaagcattgcctattcgttatttacaatggttaggccatgcatttacaggcgatttaggcacgagctttagtaacggtgagcctgtcactgaccgtattgctaaagccgttgctcctaccttgaaacttatttttatctcagccatcatcttatttcctcttggctatattattggctatctctgtgggaattatcctaagaaaaagtggtctatattcatattacgtgcgtctcaagtggtgacatcactaccagaatattggttagccattatttttatttactatttcggtgtgaaatggcatcttctaccatttgttggaagttatagctttgaatactttattctacctatcgctattttagtcttagttgaagggagtcatatggttttactcagcagtcatctatttgaacgtacacttcgtaatgaagcataccaacttgcctcattacgtcagtttaaattaaaagatcgtatttacgtacaagttaaagacatcttagcgccattacttacgattacaattaataattttattcgtttattcagtcgagtcattattttagaagtcatttttagtatttcagggttaggaaaattgcttattattagtattaatcttcgggattatccactcattctaggtattctaatgatgatgattacaatcattatgatattgaatttcctgggtgatattttactagaaaaaagtgaccctcgtttgaatatgtcgaaaacgttaggagggcgagtaacgtatgaagattaaacatttcatatggcctattgcaataatcattttagctgtactcgcttatgccctatatgataaagcaaatcaaattcatcaatctcaagcattacgtcccccaagtttacatcatttacttggtacggatgatttgggtagagattttctaacacgactatttgtaggtagcttgattacacttggtcttactgcattcattatgatagggacaatcgtgcttggactgatcattggtcttatttcagctatagtaggtaaatggttagattctatcattatggcacttgcagatatgttaatcgctttaccagctatcattatcgcgcttgtcgtccttggttttattaataattctgtagtaggattatgtcttgcactcatcatcggctggctcggtcgctatttgcggtatttcagaaatttagcacgtgacacgatgacacaaccgttcgttaaatttgcgccacttagtgggatgtcgaagttccaagttacaatacatcacattgtgccacatctcatcagtgacattatggcacttgttactgcagattttggtaagttaatgttaagtatttccggtctcgcctttattggtttaggagtaaaaccccctattcctgaattaggcgccattttacatgacggtaaaagttatttctattctgcgccctggttatttatctttccaggtgtcttattaggagggttcgcactcatatgtcaaatactcaatcgtcgtcacctacattagatacagtcctttatatcaatgatgtatctgtttatcacaaacatgaaccattacttaaacagatacatttaaagattgaaaaaggaagctttcattgtttaattggagaaagtgggagtggtaaatctttacttacacgtactgtactgaatatgaaagaagatgatttaacctatcgtggtgagattcatcttgatttaacgcaaacggatgcaatgttccaagatgcgaatcgtaattttttccaaaatgttcgtatcaagcgacactttgatgcattgtttgactctatgtcatcttcattaacacgtgatcaacaaaaagcatttgtattacgtcaatttaaacatctcggattggaccaacctgaatccatttattatcagtatccttttgaattgagtggtggtatggcacaacgagttgcacttgtcatggctattgtaaaagaagcacagtttttaattgcagatgaaccgactagtgctctagaccaacacaatcgtcaaagtttaatggctctactacatcatgtagtgacagaacatgatatgacagtgctatttgtcactcatgatttaaacttagttttaaactatgcaacacatatcagtgtcatgctaaatggagacattgtagaaacaggacgtgcttctgatattttacatcatcctcaacatacttacacgaaacaattgattgaactggctaataggagacatcaatatgttacagattaaacagttaaataaatcattttctaataaacaaatatttaaaaattttaattatacattggagacacaagatcatctattgataagtggcgtaagtggaagcgggaagtctaccttagctcaaattattgcaggattagattcaaattatcaaggtacactcatatataacgatttagaacttgaccatacttcacaacacaaatggatgaaacatatccaatatgtacctcaatataattcgagtacacttgatccaaataaaaccgttcattggatattaaaacaacctttaattcattttcattatcctaaggctatacatgaggacagaataaaagaagtcatgtcgcaatgtaagttagaatcacaattacgtgataaaaaagtgagtactttaagtggcggccaattccaaaggctatggatagcaaaagcattgcttgtagaaccagatgtcttgattttagatgaagcaacaacaaatttagatgtggtgaacgaagatatcatcttacaaatgttacgagaatttcaacatttacagttaattatcattacacatgattcatatttattgaaagctttacctggtaaacatttaaatattggttaattcaaaataaagagtgggacaacgagttttgtctcacttttttcataaatagttcaaatattttataaagtaagttgtaggttgaaatcagagtatgttatgttcaagttgcagtatacgtagttcaaataaaaacattagaggtgatacaatcatgactcaacaaggtattacagaaacacgtatgcattcagattcaaatcttgactctcattatcataaaaaagatgaacattatcctaaagggaatcgcttcttaaatgttcttatttttataggatggatgttacttgctcagattcctattgttcttattttatttattactaatttttctgcaaaaatggatgttacaagtggaacactagcaacattattatttatgctgttagccgctgtcgttatttggctggttagacgttattatcaacggcatacatatgagccaattaaaccgtttaaacgcaaagatattatgattaatatcggatgggcactattacttcgcgttattgtcattggaatgagttttctaatgatggcaataacaggtcaagcacagacagaaaatgataaggcattactgggtaactttcaaggcgcgaaaccttctcccgatcaacttggacaagcgtttcctgtcatagtatttgcacttacccttacgtttgtagctccctatttagaagaattaatttatcgaggtatctttaaagagacactatttaaacgtagcagtttttggttaccatttattttatcttcacttattttcgcttctcaacatggtatttcaaattgggtagctgttttaatgtatatcacaatggcgatgattttttatctcgcttatcatcgtcgtcataacgttagagatagtatgatggttcatatgattcataatggcgtgacgggtattgtgattattgtgagttactttatcgcaatgtttagctaaaaaagtataccagttaaatgaagtcgacaactatctcgccaaaaaaggagtggatcggaattcattttgaattcatcggcccactccttttttaattcattcgattaatctatatcaatatgatttgactcctcattaaacgcttcagttttaatatttttatcttccaagaaatttgcaatatcttgtttttctcgatcatttacaatgtcttgatctttattcacttgctcaatatcattaaaaatagatgtatcatcatccgattttaatgatatttctaaacttttttgctctatgcgattggctgttgaaatataacgacttattttatcagtatagatcacatagtcattatttgacatctgattactttgaatgtattgtccaaaatttgtatcattctcagtctctaattgaacaagtttttttaatttatttacttctgtattggataacttttgattggaatataatttcattttatatgtattcatcgtatcattgatttttttatcaatgttaatatactttttaatatcttttttaatcgttttttcagaaatctgtgtatgtcgtactgatgttttttcaaaaacatgatctggtatctttgtatctggttctagactgatatcttgatcatcagaacttttattttcctctgttgaatgttcttcttgtgtatccgctttgtccgaatggtcactattctctttagacaatcgatgacatcccactaagccaatagataatatgagaataagcgttactatcactatctttttcataacttttctccttaactacgtttatttatctttactttaagtatagaacaattacgactacttttgaatgcgttctttatatggactacggcacattaacagaataataatcacaatggtatagcctatggtagagacgatagatgtttcaaaaccaaactgtcctcccgtaagcaccatatttttaaaacgtaaaacatattgaaagacgttatagtcagtttcttttgtagtgatataaacgacttgaaagacattccaaaagaaatgtaaggtgatactcgcccaaatggtgttaaatcgatatgttgctataccaaacatcataccaactaaagtgccactagctaacaataaaaggaaacttgtcacatttagagcaccattcaataaatgaatcacaccaaagaacagtgaagtaacaacgattgctattcgaatgttcgttttcttttcaatatagcccattaaaagacctcgacacactatttcctcgacaatagcaccagctgcagcttgcataaaaataatgtaactcaaatcgtgtatcgtcttactgattgagttaaaatgatgtatcttaaaatctcccggtataaaaataaagtaaatcgcatatactacgcacggtaatgcaatacctaaaatcaaataaatcggatgaaatacaggttttgtcattcgatatgaagatagcgcctctttaaatacatgagtaattatccatcttacgatgaaaaatgtaagtaaaatataagtgatactcgataaaattgttccaattccataaaatggtatcaatgtatcaaataatagcgcaatcgtttgagaaataaccataatgattatcgctaaaagaaacataccaacaatttttattattttcatttttattctccaatataagtgatgtatataaatttatcatagcatagaaaaaagagtaagattgaattgacaatgaattcattttcctactctcttaatattaaaaatcaatttctttttgctattttagatatatatgtagaagctttatttttgtcgtaaatcgttaaaccagtaatatcttttacatttttagatggtacaagcaagcttacgatataacctaaaataaaagcaactaaaaatgaaataattgatacgtaaaatggtgagtttcctccacctattccatgaagtaaataagcgataattactcctgcaaatagtccgacaatgacaccaaatgtatttgcacgtcttgtgaatatcccaactgcaaatattccagctaacggcacaccaaataatccagtaataagtaagaataaatcccataaattattagaatctgctgcaattaaatacatcgaaataccatagcttaataaacctgctatcacaataattaatcgagcaaatttcacttctgatttatcatccctttttccaaagaagcgatgtttaatatcttcagaagtacatgctgaaattgaatttaaacttgatgaaattgttgattgtgctgcagcgaatattgctgcaataagtaatccaccaataaatgggggcatttcagtcaaaataaaatatggaacaattgatgatgtattaaaacctttaggcaatgtttcttgatgctgataaaatgaatacatcatcgtacccatgccatagaaaataggcgctgaaattagtgctaagacaccatttgtccataatgattttttggtttcttccatagattctgatgcttgataacgttgtactacatcttggctcgctgtatattgatgtaaattattaaaaatatttcccaggaaaataattgggatcgccgctgctgctgagttaagtttccaattatctgcgctaagaatttttttattcgcaatagcatcatgtacaattgtgccaaatccaccttttatttcaaaagcaccgatgataatgataagcagtgctccaccaagtaaaatgacaccttggataaaatcgctccaaacgactccttcgaatccacctaaaaatgtatataaaatacataaaatacctactaaacttgctacaatgtatggattaatatcagatacagcagttattgctaaagttggtaaataaataacgattgcaatacgtcctaagtgaaaaataataaataataatgatccaattaaacgtatacttggtccaaatcgtgcttctaaatactcataagctgaagttacatgtaattttttaaagaatggaacataaaaagcaattaatattggaatgattgctacaattgcaatatttcctgctatataggcccaatcagttaaaaaagctttttcaggtgtagacataaacgtaattgcacttaatgtagtcgcataaatagaaaagccaattgcccacgatggtaaacgtccgcttgctttaaagaaactatcagtatcttgacttgcacgtttagtaaaataggcacctactaataacattgctacaagatagacgataactgctatccaattccataacccaaatcctatatgttgcataaggatcaccccttgtttatattctgtcgtttaaattgtgtcgtaattacaagctataagtttcaattaattgatttaattctttacgatttgcttcattaaatggtgaaaatggacgtttaggtactccaccatcgatgcctcgtgtttttaatatttcttttaaagtagggtaaatacccatgcttaaaactgtttcaataatattattagtatcgtgttgaattttataagcttcttcaattttaccttcacgagctaagtcataaatttgacgtgcacgacggccattcacattatatgtagaaccaattgcaccatctactccagaaataactgcttgaactaacatttcatcaaatcctgacaaaatcaacttatctggaaatgcttttctaattctttcaagtaagaagaaatttggcgcagtatattttactcctacaattttttcattattaaacaattctttaaattggttgatactaatatttacaccagtcaaatctgggatggcataaattatcattttattttgcgttgcttcaataatatcgaagtaatattgcttaatctcttcaaaagaaaacggataatagaatggtgttactgctgataatgcgtcatatcctaaatctgtggcatactttccaagttcaatggcctcatttaaatctagtgagcctacttgagcaattaatttcacatcatttccaaccgcttcttttacaactttaaagatttgtttcttttgttctttactaattaagaaattttctccagaacttccatttacatataaaccgtctaattgttcaacttctattgcattctttgcgatttgttttaatccctcttctttaacttgaccattttcatcaaatgggacaagtaacgctgcatataatccttttaattgttcttccattcgaaatcctccaatatatgatctgaattttttataattttattattaattcaacagcaatatattctatttatatttcgaattgtaaacgctatcatatttttatacaatactatatgaaaaatattaacaaataattctaaatttgatgaaaataattttcaaattaaaactagagtactaaaaatgatttatagtagttataaagaaaactaaggaggttttttatatgtataaaattgcagttgatatcgggggcactaatataaaacttgcagtaattaacaatgaattaaacattattgattataaaacaattgctactccagacaatattcacattttaataacgaacgaaatatacttaatcattgatgcatttataaaaaaatatcagcttaaaaatcctcacattggtatctcaagtgctggcgttgtagattcaactcgtggagaaattgtttacactggaccaactattcaaaattttgatggtacaaattttttaaatgttttcaaggaattgtcctcaaatataactgtttacaacgatgtagatgcagcattacttggggagctttctttgcataattatgaagaaaataacatcttttgtcttactttaggaacaggaattggcggtgcattttataataaatctattggaatctatcaaggtgcacgtcatcgagcaaatgaaattggttatttgctttatcgttcttccgatgacaaaacatttgaacaaagagcttcaacttcagcgctaaaagatttaatgctattacatcactttaagtatgacactaacgtaccaaaattatttgaattagctgaagaaaatgacactgtagcaatcaatattttagaagagtggagccattcagtagctgaaggtatcgctcaattacaaattatctatgatcctgaacttatcttgattggtggaggtatctcttctcaaaaagatacactattaaaatatattaagcctaaaattcattattaccttccgcctcattatggaatagcacgtcttcagacgactcgaagtggtaataatgcagctttgtacggtgcaatacaatagtagttataaacatggaggactacgcattctagtcctcttatttatttgctcccatggtttagcacaacttgacgtgtttgttgatagagtttatgcatgtaaggatctccaagaagaatgtaactcacaagatctaataaaaagtgagttgcaatttgtgaattaataaatcttgtatcattattattggactgcgcagacgtaatcagcactaaatctgcatttttagtaattgtgcttccttcaaaattagtaattacaacaacataagcgccttgatttcgtgctattttagccgcatcgataagctcacttgtttcaccactatttgaaattgctacaaacatatcattcgatgataataatgacgcagaaatcttcatttgatgagcatctgtggatactaaaccttttatccccatacgcatggcacgataataaaattcacttgctgttaaacctgaactccctaaacctgcgaaattcacctgtctacatgtttttaaattatgtgctaagcgtttaattttttcctcagaaataaactctccagtttgttgaatgatattttgatgataacgatgtataagttgtactaatggtgcattttctacagatttctctgatttttcatgttgcaaactaaacttcatatcttgaaaattatcgtaatttaatttgttactgaaacgcgttattgtagctggcgatgtttcaattgcataagccaatgaattaattgttgagaaactatcatcaagtggatgcttttgtatatattctataattcgtttatctgtttttgttaataaatgacgacaacgctgaactctattttcaaatttcattttacaatcatcctctttactcaattaaataacttatgtctaatttattataaatgaaaatatttttcaatttataattttaaattgataataattttctcaatgttatgatatgagtaaatcaattcaacagtattgtataaataaccacaaactcgatatattctatttataaatataaatgttacggagtgaatgatatgttaccacaaggattaatcgtttcttgccaagctttacctgaagaacctttacattcttcgttcattatgtcaaaaatggctttagctgcttatcaaggcggtgcagtaggtatacgtgctaactctatagaagatattgtagctattcgcaaggaaatcaatttaccagttatcggaattgttaaacgagattacactaactcaagtgtatttataactgcaacttcaaaagaggtaaatgaactcattgaaagcggttgtgaagtcattgctttagatgctactaaacaaaaacgtccaaaagaatctcttgaagaacttgtgaaatatattagagaaaaagcgcctgatattgaaattatggctgatatctcaacgattgaagaagctatttatgcagatcaattaggttttgactatattggaaccactctaagagggtatacatcttatacaaagggtcatatattatatgaaaatgattttgaatttttaaaagaagtacttaatcaagtaaacacaaaagtcattgcagagggtaatgtcatcacacctgacatgtataaaaaagtgaacgaacttggtgttcattgtacagtagttggtggtgcgattacacgacctaaacaaattaccgaacgatttgttgaagcagtaaaaaatcattcataaacatatggaggcgtttagatgatgaaattgatcaatttaaaaaacaaatctatcgcaagtgattatgtagcagttgagttattaaagttaatacaaagtacgccgacagccactcttggattagcgacaggtaatacgatgacagaaatctatccacgattatctgaattattaacggcaaatcgtgtgaatttaaatgatattaaaacatttaacttagatgagtatgtgggtcttaattcatcacaccctcaaagctactacacatatatgcatgagctgttatttaatcataacgaatggaatgaagatcatatctacattccaagaggagacgcatctgatcttgaagacgaagcacatgcttatgaacagcgtctatcctctataggacaacccgatattcaattattaggtattggagaaaatggtcatatcggtttcaacgaaccaggtacatcttttgatagtcaaacacgagttgtagatttaactgattctacgattaaagcaaatagtactcattttgatacgattgatgatgttccaaaacaagccatttctatgggattacaatctattatgcgcgcaaaacgtatcattttattagcttttggagaacgtaaacaagaagctgttgagcgtttaatgaatggaccgaaaactgaaacattacctgcttctattttacaaacgcatccgaatgtagacattatcattgatgatgtcatatttaattatttaaaccactaaaaaggacagaacgctcgagttctgtcccttttaatatgttaactttacttcctatggatgtttaaataattttaaaagcaatgaaataataatacaaactatcgcaataattgcgaaagtaatcaagaaaattaaatccgtttgagtgaatttcacactgatatctgaccaacttttaaaagaactattataaagcgcattgactactacaactgctaataaagcaatgaccgataaccatcctaaagtagtaaagaaattttttgcacttggaaatcttaaatcattttgcattatctatccctcctttacttagaattcatatattatgtagatttactatgtatatacactaaacttcatatatataaacctaaaaagataaagagatactaaattattcatttttcaccatgcgagtagtcttaaaaatgatgaatggtacctgatttaatcgttgtatctacttgtatatggtcgtctacaattacgatatctgcatcttttcctatgcttaagcttcctttttgcttatcaatattaagtgcaatggcttgatttaaacttgccactcgccataagtggtctaaactatcatgcgtaaattgaattaaattatgcagtccttcattcatttttaaaatactgcctgcaagtgtgccattttctaaacgtgcttctttccctttaacaatcacattttgtccacctaaatcatactcaccatctttcatacctttggcacgcatggcatctgtaattaaatacatgtgagtagctcctttttgcttatatgcaatatctacagcagcaggatgtgaatgaatcccatcaccaataatttcagtgtttaaactttgattggtccatgcggcaccaaacacacctggattacgatgctcaaaaggtgttgcagcgttgtaaagatgcgttacatgtttcgcacctcgttctaccgcttcatttgcttcttcaaatgtggcaacagtatgtcccattgaaaagatgatatcatcacgcaattcatttaacgtctcatgagcaccttcgacttctggggcaaaagtaatgattttaattaatcctttcgctacctcttgaaaatgtcgaattttttcaacagtaggacgttgtacatatttagggttttgagcacccactttatgttcagaaataaatggtccttctaaatgtacaccaccgatttcagctgcttcacctaacgtttgattttcataacatgcgacaatgttttttaatgctttttcaatattctcatcagattgcgtcatcgttgttgctaaaaatgttgttgtcccttcagacaataattgtttagctaaatgatttaagccgttatacgatgcatccattgcatcttctccatagccaccatgaatatgaatatcgataaaacctggtaacacatgctttcctgctacatctatttgatttaaatgacctttataatcacctttttgaatatcactaattttgccattttctacgacaagataccctttttcaataacttgtgcttccgtataaattcttccatttgtaatgacatattgagccatgataccccttcttttctataaaatttcttatcatttcaaagatattatatcatttcatattgtcatcattaggcaatttcttcttttggaaaaaattttcaaatttaatgttaaccttctttaaaataatatataaacgattaaaatgaattttgaaaatattcataattatatgtataatcaaaacaactattttataaagggatgacttaattaattcatgaatgacaaacgtaaaagaaataacagactggtttatatcatttcagtgtctattattattattatcactgcaattgctggtatatttcctaagacatttggtacacatgctcaaacgatgtacgattttatttcaaatacttttggttggcttttcttacttattatatttattttagatatttttctaatttctttagctgcttctagatatggtcggttcaaattaggagacgataatgaagaacctgaattttctttcatgtcatggattggcatgttattctctgcgggtttaggtgtaggcatagtcttttggggtgtagctgaaccactcacacattatcttcactcaccgtttcctggaaaagcgccagatcaatctcctgaatccgcaagacttgctatgggttataccttttttcattggggaatctcacaatggtctatttttgcaatggctgggcttatcgtcgcatactttcaattccgtaaaaaacgggatggtttaatttctactgctatggaacctgtctttggtgaagcctacaaacgtccttttcgaaatatcattgatatcttagcaattattgctaccgtaatggggatagcaacatcaattggacttggtattatgcaaattagtggtgggttaaatcatgtcttccaggtaccaaataacaatatcactaaaatttcgattacagtattaatgatgattattttcattggatctggtattacaggtctaggacgaggcgtaaaatggctgagtaaccttaatattatattaggcgctttattacttgtcttcatgcttatcttcggggatttaaaatttatctttgaatcttacacacttgctatcggggactacataagacactttgtcgaatatagtttacgtattgatccgtatacaaataacaatgcttggattcaacaatggactgtcttctattgggcatgggttatttcttggtcaccatttattggaggtttcgttgcacgtgtatcacgcggtcgcaccattcgagaatttattatgtgtgtgcttatagtacctccactcatttcattcgtttggatttgtggcttcggtggtatggctgtcaaaattgctatgggtggcgataaaattgctagtcttgtagataaagattatacggttgctttatttgaattattatcaaaatttccattatctgatattacaagcggtcttgccattttgttaatctttttattcattgtcacaagtgctgactcaacaacacatattgttgctggaatggctactggaggcagtgaaaatccaaaaataaaacacaaagtcatttggggtttacttattggggctatttcagtcgcaatgaccattgcaggtggattaacaagtctacaaacagcctctgttgtaactggcttaccattttcgattattctattattgatgacgatatctatgatgcgtgcgttacgacgagaacatacaaaacatttccaaatgtcatatgttaaggatgataaagattactctattccactcgaaaaacgcgaaaagaatagtaaaactctaaataatgatcattcggaaaaatcataaacatacaattatatgtatttaattgactcattactatgtagtatgaaactctaataacaaaaataaaaacgttctccctatttgttagtgagaacgtttcttttatctatatatcattacccatctatctcaaatcccatatcttcaatcatttggtaatcaagctcattaggttgtccgcctgttactaaataatcgcctacaaagatagaattggctgcttgaagtgcagttgcttgaagtgaacgtaaattgacttcacgaccacccgcaattcgaatttctttagtaggattaatcaatcgaaacagagctaagatacgtagacactttgttggagataacaagtctaacccaccaaacttggtacctttaatcggatgtaagaagtttactggaatactgtctgcatcaatctcttttaacgcaaatgccatatcgataatatcttcatctgtttctcccatgccacaaatcacaccagaacatggtgaaatattatgttctttcataatttcaaccgtattcactctatcttcatatgtatgtgttgaaacaacttcctcatggtaacgttcacttgtatttaaattatgattatagcgatcaacaccggcttcttttaattgtgtcgcttgttcatcatcgactaaacctaaacacgcacaaattttaagttgtggatgaatagctttaatatcttctaccgtatcacaaatatgatttacttctttattcgaaggaccacgtccactcattacaatacaatacgttccaattttatggtctgtcgcgacttgtgcccctgctttaatttgttcttggtccactaaagcataacgttgtttttctttcattttgacagattgaccacagtaaccacaatcttccggacatatgccacttttcgcgtttaaaatcatattcagttttacttttttaccgtaataatgttttcttactatataggcttcatttaataattcaaacgtatcaatcgtttcgtcttgaaatagacttagacactcttctttagttaacgcttctccattcaatacacgttctgctagatttaatgtcatgatgtttgtcactcctatcttttaaaatacactaataaaactcataattgtaaactttatataataataagtttacattattctttgattaaatcaaaggatgttttaaaatgaaatggtctatgaatataacctcagacaatccgaagtagaacttgtaactattagatatttgagtaactcataaaaaaacttgagcctacatatgtaaaatacatatattaggctcaagcgatttaatataactatttattttgtaatacgtgtaccaattttaccttctagcgcatcatttaaacctgataaagaagtaatcaacacactacctttgggattcttttcaataaattgaagagctgcttctacttttggcaacatactgcctttcgcaaattgattatcggcaatatattctttcatatcatcgactgtaacgtcacttagtccttcttgattgtcttttccgtaattaatataaacataatcaacggctgttaaaatcattaattgatccgattgtaaatgagctgcaagtaatgcacttgtcttatctttatcaatgactgcatcgacaccttgataacgaccttgttccttaacaactgggatgccgccgccaccagctgcaatcacaagcgtaccatgtttaatgagtgtttcaatactatcaagttcaacaatattaataggttgaggagagggcacaacgcgacggtacccacgtcctgcatcctccataaatgtatatcctttttcttgtctcattttatctgcttgttcttctgtataaaataagccaataggtttcgttggatgttgaaacgctggatcatcgtttgctacttcgacttgtgtcacgagtgttacaacttctttattgatacctaaagtatggagttcgttaagtaagctttcttgcatttgatagccaatatacgcctgactcattgcgccacattcagggaatggaaaaggcggaccttgttcatgttccgctgcataatttaatcctaaattaatacttcccacttgtggtccattcccatgactaatgaccacttcatatcctttgtttattaaaccaactaacgacttagctgttccttttacgagctctagttgttcttttggtgattcccctaaagcattaccacctaatgctaccacgattttagacatccataggtcccccttttttctctattcgcctaaagttgccaccattactgctttaatcgtatgtgctctgttttcggcttcttgaaagacaacagaacgatcactttcgaagacctcatctgtgacttccatttcattcaaaccatatttttctttaatttgtttaccaatttctgtttctgcattatggaaagcaggtaaacagtgttcaaaaatggtatgtggattgcctgttttttctattaattcttttgttacgcgataaggttctaataatttaatacgttcttcccaaatatcgtcagactcacccattgacacccatacatctgtagcaatcacatcagatcctttcaccccttggtcaatattgtcagtcactaaaatagtaccgccgtttttatcagccaatgattgacatgtttttagtaactcatctttaggtcttaactctttcggacatacaagatggaatgtcattcccataatcgctgcgccttgcatcaatgcatttgccatattattgcgtccatcaccaatatatgtgaaatgaatgtcttcataaggtttttttaatacttcttttgcagttaaaaaatcagcaagcacttgtgttggatgatcttcattcgttaaaccattccaaaccggaacaccagcatattctgcaatttcttcaatagtacgttgagaaaatccgcgatattcgataccgtcatacataccacctaaaacacgagccgtatctttagccgtttcttttactcccatttgtgtacctgtaggcccaagatacgtcacatgagcaccttgatcataagctgctgtttcaaacgcacaacgtgtgcgtgtagaatttttttcgaaaattaaagcgatatttttacctttaagtttttgttgttcaataccagcatattttgcacgttttaaatcttcagagagattaagtaagaattccatttctttttttgaaaaatcaagtaatgttaaaaaatttctatttcttaaattttgcatcttagcccactcctttgtcagagatttagcatttaaaattcaatacacatcatgtgtattaacgttacaatatgtgtaactttttattatattattacacaaaaaacatgagatagaaaatttaaaacgtacaacaaaaaacatgagatagaaaatttaaaacgtacaacaaaaaacatgagatagaaaatttaaaacgtacaacaaaaaaacttctttgtcatatttcgacaaagaagtcactcatatttatgctgttttaacttttcttttttcttcacgatctatcatatcttgttttgtaacaatcggatattttttgaatgcaagagaaccaaggaaacctgctaaaccacccacaatggccattacaacaccatagataatcactttcattggactattaaagccaaacatcactaagaatcctgcaatgggtgttgctgtacctgttgcgtcattgatcataccagataaagcgataattaaacctgcagcagctcctccaaagaagtttgtcacatacactggtatcgggttcgcagagacaatatcagcttgagataacggttcaatacttactgaaatcgttgatttacgatctcctaattttaaacgatggaacagcgtaccattcataaatgccgaactaaatgcagccatagcaccaatggccattggcacgccagttaaaccaagtaaggcggttaaagccattgaacttaacggcgctgtacctacaacagtaataatgcctccaaggataatccccataataatcggatttgtgtccgtactacttttaataatgtcaccaatttttaataatgtattattcactacaggcgttaaacccgtcgcaattaaacgtgcaagtggtgcaagaagaatgattgaaccaataagatccacaccatctggaacatatttttctgtatatttcataagataacctacaatataaccagcaaagaagcctggaagtaagtctaaaccaccacaagcagctccaataactaatgcatacacaggtgaaacaccaatagctaaggccgttaacccagcagcagcaacaccaccaagacctcccgcagcgtcacctaattgttctaaaaatttaataccaaatacttctccacctacatatttgttaaaagcttctactaaaaatgtcgcaatggctgcgttagctaaagctcccattgcacgcataccactaggtgctttatatgtaaataacgtaaaaatcactaagactaaaactaaaaacaacgtaccaattaataaatccatagtctactgtcatccccttatatttaatttagatgtgagatatggcttcaaatcaaacaatatctcactacttactttcttccttagtagacagtttactaaaaaacgaaatatatttcacggaattttttaaatttttaaattaaatcgaaaatttcgtttattttttacttaattacttcaaaatatatctatcttacacattatgaaatgatcgacaaaatgatataaatatacaaatgaaataatctgtagttataacttatcttgaatatatttattaagtcactcacttccttttaaatatgtgatatgacgtgttaagcacattctgtgtgtgattttaactattacatttgtcataataacaatcgattataactgctcttttattatgcaaaaagctgagacgatcaaacgtctcagctgtatgacatctatattattgttctattaatgaaaagtttattaatttattccattaacataacttttgataatcataaatgataataaatattatttattgttaacttaaacttagaaaaggagatggcaaaagtagataaaaagacttttaaaataacattagttggagttttgattttattgtattttttattttcattaagcgacaattatagtatcaccttactttgtttatcagctattattttaggtacaattattcattttttagtagaatttattggtaattatctatataaaaataaaaagtagattatatattcatgtctagaaaagcccttttgtatctttattctgttaataaaataaacaacaaatgtcctaaaataactaagataatagtcattaaaataatactgattgttgctattatttttattgttcttctactaaagtcagtattagtataaatcgaaaaatagaacattaccaagtatccaacgaacatgccatacatagataataaaaaattccattcaatatccatatatcctccacgcattaaagcatacgttcctataattataaaaaataaaataagttggtatataaaagttatcatttatctattagcctcctacattagtattatatttttagattggtagcaatctttagataatgttctgaactaatagcggagattggcaacctaaagaacaattaaaaaagttataatacaataatactggagatgtgatgacatgagtacaaataaaaaaatatattttctttgtttcatattatcttttattatttatatatttttacctaccaacttttttattactcgtttattcgttatttttcctttattattcttaggtgcatttttattttcttcgaacaaaaaaagttagctacaagtgtagttaacttttttactatctctcaatcttaaagaaaggataaaaatggataataattagttttatagtgacggaacttctgataattatcacttatgttaactgcttatttaataatattaattgaaatggtccaatcaatattagaatacatctatatctctattttcttttaattaagtgctctttttaaaattatcataaacgctaatataacaatacttatagttaatattgaataagaatttatcgatactataacctctaatattgcatactatttacaattgttacaagaccactttaaattgtctgaatactattattttagttgatttcataggcttcagtcgacgtcaatgctataaataggattgatttttttatccaaatcctatttttcctattactttttaacctgtttattattctataaatctctctaaatgctctaaaaaagtatcttaaaatttcaaatagtggttagctatattttttactttataacagaaccagaataagcatatatatttagggtatatataagtaatagacatctaaataataagtaataggaggctggtgtagatgttcaaaaatatattattaccctatgatttcgaaaatgattttagtgctatccctgactatttagaaaaagtcaccgatgaagattcagttgttgtaatttatcacgttgtaacagaaaatgatcttgcaattagtgtcaagtattataataagcataaagaagatattattagagaaaaagaaaaaaaactcactccatttttacgtgaattagaaaaaagagatattcaatataaaatagatgtagattttgggcatattaaagatacaatcttagaaaaaattacttctggagatataaataatggtgaatttgatttagtaattatgagtaatcatagagtcgatttgaatattaaacatgttttaggagatgttacacataagattgctaaaagaagttctgtcccagtactaattgttaaataaacataagaagtaagaaatttattaattcaaaaagcctaaatactttctcacaaatcgagagagtatttaggcttttttatttttttaattttggtttgtgattttttagattattttttgattagtcgttctaaaaaagattagacacgcatttatgccgagaaaatttattgaagttgagaagaacccttaactaaacttgtagacgaatgtcggcatagtgtgagctattttactgaaatttattttgttaataagatccatgttaaatgtcccaggataaaaataataataatcgttaacatagaactgatataggctattatttttatttttcttttactgaattctgaacttttataaactgaaaaataaaacataacgagaaaaccgaaaaatatcccacacatgattattagaatatcccaactaatattcatgtagcctctgtgtattaatccataggttactaaaattaaaaaaaatgaaataaattgtcttatgacaggtatcatttactagcctccaaaataaaacaattggaataaagcaacattgatgttaggtaaataagttataaataaaatctgtaaagtatgtctctaaaaatgctgcgagtatgtataaaggcaaagcaattagaaaatatattttaagtaaattactaaaagctaatacaaacgaaaaattctgttttttattctttctaaaaagattacttatttttctaatgattgttttatttaatttatataaaccactgataacaaaacacattgcgaatgtttcaattattgcatgtggtatagaagataaaaccataagaagacctttattaaaatcaaaatggattgcgaaaccaaatgcaattcctgtaattatacttgtggaaactatatttaaaaaatatagaaatggtattgggattaaagaaaagataaacatttgaaatgggactcggatggcattatttaatatatattgccatagtttatttaaaccttgtgcattatcaagactagaaggtactttatttgatatatttttaaatgtttcaaatgatggattgaatataattgatagagtgaaacttagtaataaaagacttgttgctattatgaatatttttagtgatcttttgaaataattttcgtctttgatttttaacatgatctactcctttttctcttgttttttaaaacgagtgaaacgagtttcttcttatcttgattataagttttcatttattctcattgacgtacattttgtatctttatttagtcttacatgcataaaaaacgggcaatttaattcgtctattttttttagacttttatgataattttgtatacctatacatacttcaaagttaattttacagtataaattaacaaaaaagagcattcttcatgaattatttttttaatttttttaaaaagtataaatgaacattgtatattactactgcgcttattagcataattattgtataaagtatcgtacctaaaatatcatggtgtttgataaaacatatttttttaacaatgcggctacgataaagatcattatacagttaattacatgaaaagtagtattaatggttacttttttgtttttcttcattaaaaaaactcctatttctcaaataagtgattagaataataaagtaaaatcgttagttgttatttgattaatcttatttgtattatctatattaaaacgaatattctcaatttgtatctttattctgttaataaaataaacaacaaatatcctaaaacgatcacaattataacaattttattaacactgcctatattaccctactctactgaataaaacgccttctgaagggtaaatacaaatgtgaagaaaattaaatcaacttttaaaatagataaagaagagcggaaatgctcaaccaaaggaggacttcactattatgaaatacgtagtagtcggaacatcacatgcaggctatgctgcaatagaaacattattaatatcagatccagaggcggaaatcgaagtatttgaaagtgccgagacaccttcattcttatcttgtggtattcaaagttatttagaagatgttgcaccatcattacaatccttgcattatgcagatgcagaatcgttaaaagaacaaggcgtgaacttgcatcttcaaacaacggtaacggatttagatactcaaaataaaaccgtgactattaaaaaagatggcaacacttcagaagtctcttatgataaattattcttaagcccaggcgctgtaccaaacgaactaccaatcaatggcatcaacgagtacaataatgtcttatttatgcgtggtgaagaatgggccggcaaaatcaaagaacgcatgcaacatgcgaagaaagccattgtagtcggcggcggttatatcggtatcgaagcagccgaagcctttaccaaagccggcatcgatacaacacttatggatgaccacgatcgtattatcaacacttatttagataaagaatttacagatattttagagaaaaacattgccgaacacggcttaaaattcaaaggaaatgcgagcgttaaagccttgaaagcagacgataacaacaatgtcacagccgtagtcacagatgacggcgaatacgaagcagatacagtattatttgctgtcggcgttaaacctgcaacagaatggttagacggcaaagttgaactcggtaaaaaaggcattatcaaaatcaacgaccgcttagaaacatcagaaaaagacgtttatgcaagtggcgacgcaacgcttattccatttgcgcctatcaacgaagaccgctatattgcacttgcaactaactctcgtcgtcaaggttacgtagcagcacgcaacatggcaggcaaagacatgaagatgccacgcgtttcaggcacatctggtctttctttattcgattacaaattcggtcaaacaggcgtacatgaaacagaaaaagacagttacgacggcaacttaggagcaaaatatatcgaagtacctgtgcgtcctaaattccgtcaagacgatacaacagttcatcttaaaatcatgttcgatgaagatacacatcgcattctgggcggacaaattatgagtacggaagacttagtagaatctatcaacacactatcggttgcagtcaatgcaggctggacattagaagaactcgcattagtcgacttcttcttccaaccagactttaaccgtccatggaactacttgaacatcctagcacaacgcgcactaggcgacgatgtcttccctaaagacaaacaactcttctaaacccttacggacaaaaaaaggtgcgtctctcctcagggagatgcacctttttaatgagcttaatactatttcaaagagactccaaccctttgaaagcatataaaagaatcgataagtctgcatacccactcatcgattcttactttatttagagatacatttctttaatgtggcgagtttgattaaccttcttttctttttccaattcttcacgatttgcttgatttcactagtagcttttttcatttttaaatacctttatttttaaatttaaggggtatttcaaagatttagaggtaattttatataagctcttaaaacgcaaatatgagtcaaataactgtattttaagtacaccaactaaaatttgaacaaaaccagtgaataattttttagacactgtccatttatatacaaacttaaaagttagtataaaaagtggtcaaccatgtcggttgagcgctatcattcccacagaaacaaaaaagcataaaaaacgtaaaaaacctataacatcaaagtttaagagtactttttcatctttactagccactcatagtttcaaatcatcaaattaataaataaaaatatagctattaatgtttattaatttggtttcattataagcaatattttcaataaatgtctcaacaacaggcttaaaatatatataatatacgaaataacttcctataaatcactgattatgtcaaacaaattaaaaggtttaaacattgatttaacagcgtttaagtcttttctttactactgtttattcctcctttatataccattgatctgacactttattatctatttttattagttaatattatatagatttattctgttagtaaaataaacattaaatagcctaaatgaccaagataatagccattagaataatactaatggttggtttttgattcttctttttattgaatatagaacttttatagactgataataaaaaaaattcatttatgtaaatattattttttgttaatttaaatttagagaaggagatgaggaaaataaataaaaagactttcaaaaacacttttaaaacaacattagttgtaattttgattttattgtattctttattttcactaagcgacaaataatatctgtctcttatacacatctccgagcccacgagacgtagaggaatctcgtatgccgtcttctgcttgaaaaaaaaaaacatctacttcagccagccccatccttttcaccgagatctacacctaaaacgacgcggcgaccaccgagatctacacctaagccttcgtcggcagcgtcagatgtgtataagagacagttataaaggagtgagacacgattcaaaatgaatcgtgtctcactcctttactttgatttttttagtttgaataaaactatcaacgataaagtagtttaacgatcatatttatcaaaatgttcaccagtaaagtaataataaatactttctgctatatttcttacatgatcccctactctttctaagttacgtgcagctaaatgtgcttgaccagctacaaatggatcattatcaattagataagttgtgttaacaatattcacgtataaatcatcaatatctttatcacgttcgataatttctttaatcaatgttaaatcttcacttttaacagcagtatttaagtcttctaacattaataatgcaagtttacccattgtttttaaacgtgttaagacataatgatctgtaatttttactcttagtcgaatatgagcgatatttgcagcattatcccccattctttcaaaatcagtagaaatttttaaagctgccatcatcattcttaaatcagtagcaattggttgttgtttcgtaattaacatgattacttgttcgttaatgtcataatcaaatttgttaatttctttatctttttcaatgacgtgtctagcaaagtttctatcatcttcacttaatgattcaatagcattgttaacatttgaataaacacgaagaccaagacgacgaagttctttaattaaatcgtccaattggccttcatatttttgtctaataattttcattaagcattaaccaaaacgaccagaaatataatcttctgtttgtttgtctgaaggattagagaagattttatcagtatcgtcatattcatttacataaccattaaggaagaatgctgttttatcagaaacacgtgcagcttgttgcatgttgtgtgtaaccataatgatagaataattttcttttaattcttgaaccagttcttcaactcttaaagtagagataggatctaatgctgatgtaggttcatccattaaaataacatctggttcaattgctaaacatctagcaatacaaacacgttgttgttgtccccctgataatccatacgcatttgtatgtaatctgtcttttaattcatcccaaattgcagcaccacgtaatgacttttcaacaatttcatcaagtaattttttatctttaataccatggatttttggaccataagtaatattatcataaattgatttaggaaatggatttggttgttggaataccattcctacattcgttcttaatttttcttttgaatagttattatcaaaaatattttgtcctctgtataaaattttaccagcagttttaactgatggtactaattcaaccatacgatttaatgttttaatatacgttgatttaccacaaccagaaggaccgataatagcagtgacattattttctaagatatctaaattgatgttttgtaaagcatgattttcaccataccataaatctaaattttgagttgaataaactacttttctttcactgtcaggtttaatatcttttttattttcgctattagttgttacaattgttgtcttttgagactgattgtcgtttgttggatgagtgtgatttgagtgttgatcaacaacatcatttgtatgttgttcaatgttctttttcttttcatctacgttgatttttgccatatataaaactccttttattttaagagagaaagcagaaatctttctctctatcccaaataactttaataataaaatgcttaatattttctagaaaatttattacgtaagaaaattgctaaaccgttcattaataataagataacaagtaatacgataatacctgctgatgccacgttttggaattcagcttgtggcattttagcccaagtataaatttgagttggtaaagcagtaaacattgagaataaaccagatggtactgctaagaaaatagtcggaatgccgattaagattaatggtgctgtttcacctaatgcacgtgaaagtgataaaataaatcccgttaaaataccaggtaaagcagcgggtaaaaccacttttctaattgtttgccatttatttccacctagaccataagatgcttctcttacagaattaggtacggcacgaatcgcttcctgacttgaaacgataataatcggtaagataagtaatgacattgttaaagcagcagcgataacagtatttcctaaagataatgcttcaataccagcgccacgtacaaataatgttaaacctaataaaccaaatacaattgaagggacaccagctaagttagaaatacaaattttaacgaaacttgtaaacatattatcgcgtgcgtattcttcaagataaattgctgtaccaacacctaagataatagaaattgggataatagtaatcattaaccataatgtaccagctaatgcgcctttaatcccagcttgtgatggtgttgaagatgagaaacttgtaaagaattcaggtgttaaatgtcctacaccttttacaagtgtttgaatcagtagtgcggcaagaacgattaaagcaaatacaatacatgcaaagaatagccatttattaagactattttttttatcacgactagataggtttttttcgactttatttttgtcaactaaacctttagctcttggatcagtcgttgctgtcatattaatactcctctctataacgcttagatatccagtatgaaattaagttcataattaatgtgaaaatgaataatgtgaagccaactgcataaatactatagtaaatatctgaaccgaatgtcgcatcacctgtagcaatttcaacaatataacctgtcattgtttgaatagagcttgttaatgttaaagatgatgtcggtgaactacctgcagctaatgatacgatcattgtttcaccaatagcacgagaaataccaagtacaattgaagcaattacaccagaagcggcagctggtaatacgactttagttgccacttcaaatttagttgaacctaaaccaaaagcaccttcccgcattttattaggtacagaagccattgcatcttcactcatacttgtaataattggaacaatcattattccaactacgataccaggactgatagagttaaaactatcgagttgaggtataaatgttcttaataaaggtgttacaaaagttaaagcaaagaaaccgaatacgatagttggaataccagctaagatttcaagaataggtttaataatacgtcttgctttatcgcttgcatattcacttaagtagattgcagcccctaatccgataggaacagccactaaagtaccaatgaaagtgatttttaaagtaccaagaattaaagcccaaataccatatttaggatcagaacttgtagggctccaatctttagtaaaaagaaactcagtaattgaaacacgtgtaaagaatgtgattgtttcagtgattaatgtaaataatataccgatagttgttaaaatagagatggcagcaataattcctaaaataattggcacgattttatcagaaaatccaccttttttagcgttatttttagctatcatctctctaacattagtgttagaagccatatataaccctctctttttatttctcccaatagattttaaaaaaagagcaggaaattatcaggtaacgaatgagttcaaattaatttaaaacactttaacaatcacccatgtatatatcctgaacaactcatgtaaatgaatgttacatgagttgttaattcccagccctttatattaataatgattattatttgtcagaatcttttttgtatttatctaattctttaatttcatctttataaactttgcttggtgaagcaacgtatccagcatcttcagctgatttacctttgtcatctaaagtgaatttcaagaattctctcataacatcattatcttctaatgatttttctttaacatataagaataatggtctacttaaaggataagaaccatcttggatagtctttttagtaggttctacagatttaccatcgtcacctttaattttaacttcttttaatttatctttattttgtttatagaagttataaccgaagtaaccaatactttctttgtttttctcaactgattgaacgataacgttagtatctccatttttttgagctttgatatcttgtttatccataacttcttcttcccagaagtcataagtaccatgacttgagtttggagagaaagctttgatttctttgttaggccagctagaatctacatctttccaagttttagcttcgccactgtagatttttttcaattgatctttagataattcttttacaaagtcattatctttattaacagcaacagttacaccatcttgtgcaattttaaattctttatatttaatgtttttgtcttctaatttttgtttttcttcatctttgataggtctagaagcttgtgagaagtcagtttcaccagcgatgaatttttcaaaaccagcaccagtacctgcttgaccagatgaaatagttgcgcttggatgatctttagaccatttttcatttaatttttcaacgattggagcaacagtagatgaaccttcaccttttgcagaacctttaaggtcttttccatctcctgaaccactgccgccactatttccaccgccacatgcgcctaaaagaacagtagcacctaaaacagttgtaccaactaattgccatttcttcattaaaacatcctcctaattatagataacccaaaatgttatatgtatttcttacaatgcttatattacataccttttgttaatataaaatagagtaattgtaaatattttgttaatttataaaaaacttatgttttatataaataaaatccataaaaaaaccactgaaagtgtgacctttcaatggttttaaactatctatataatatggaagaaactcgattttcatgaactcattattcttgaataagacttttaccttttttagttaatgtgatttttccagtttcaatatttataatttttcttttatataaatgaccaattgcacgtttaaatgaacctttactcatgttaaatacttctttaattgcttccggacttgatttatcccaaaatggaagttctccatcatactctactaacaaatcaaagataacttgaccatcctcatctaaacgttcatgtgcgaggggtaagaatgaaccgttcaattcacctttttcattatgtccgataatacgtacttctacagcttcgcctaatcttggctcatgtttacgttcagactcatgtacaaacactttgtaaccatcctcagttaataaaaaagtcccgatacgtaataaacgatagggtcttgcttttaatacttgattttgcatatcatcattagatacaggtgtaaacattttttccacaattgtttcactagctaaacgtgcgaacatttgatgatttctatcgattcttaatgtgactaatacataatctcctgattgaggccataacgatttaactttaggtaaatcttcccatggaataagcacctctcttggtaaaccaacatctactcttgcaccatctctatctgtttttaatacttttgcaaaatcatatttatcttttgtaatgtcaggcatattttgagtagcaaataattcacctgaacggtttggataaatgaagaaactgtattcttctccaatttcgaattcatcttcctcattgatttctgactgatttaacttcacttgttcaccatttggaccttttaataaataagtagagccttccaatccaagaacttctagaaattcaattgaaccaacgatatctttgtctaatgccatagttgtctcctttaagcagtttatttctaagtattataacatgagttttataaagtatcattggcataaatgatataaggtcgaatataggaacattatatgatataattttttgcgttagataaacgatgaataaaggagtaaatgaatgttacaagttacggatgtaagtttacgttttggtgatcgtaaactatttgaagatgtaaatattaaatttactgaaggtaattgttatggacttatcggtgcgaatggtgcaggtaaatctactttcttaaaaatcttatctggagaaattgattcacaaacgggtcatgtttctcttggaaaagatgaacgtttagcagtattaaaacaagatcactttgcttatgaagatgaacgtgtattagatgtagttataaaaggacatgaacgtctatttgaagtgatgaaagaaaaagacgaaatttatatgaaacctgacttcagtgatgaagatggcattcgtgcagctgaattagaaggtgaatttgctgaaatgaatggatggaatgccgaagcagatgcagcttccctactatcaggacttggtattaccccagatttacatgataagcaaatgtcagagttagaaaataatcaaaaagtaaaagtattattggcacaaagtttatttggagatccagatgttttattactcgatgagcctaccaatggtcttgatattcctgccattagttggttagaagatttcttaattaactttgaaaatactgtcattgtcgtatctcatgatcgtcatttcttaaataatgtatgtacacatattgcagatttagattttggtaaaatcaaagtctatgttggtaactatgatttttggtatcaatcaagtcaacttgctcaaaaaatggctcaagaacaaaacaagaaaaaagaagaaaaaatcaaagaattacaagacttcattgctcgtttctctgcgaatgcgtcaaaatcaaaacaagcaacaagtcgtaagaagcaattagaaaaaattgaacttgatgatattcaaccatcttcaagacgttatccttatgtgaaattcaccccagaaagagaaattggtaatgatttattagtagttgatggtatctcaaaaacaattgagggtgaaaaagttttagataatatttcattcactatgaatccaaatgataaagctattttaattggcgatagtgaaattgctaaaactaccctattaaaaatacttgctggtgaaatggaaccagatgaaggttcatttaaatggggagtgacaacttcattaagctatttccctaaagataattctgatttcttcgaaggcgtagatatgaatttagttgaatggttacgtcaatatgctcctgaagatgaacaaactgaaacatttttacgcggtttcttaggacgtatgctatttagcggtgaagaagttaagaaaaaagcaagtgtattatcaggtggagagaaagtacgttgtatgttaagtaaaatgatgctttcaagtgccaatgttttactacttgatgagccaacgaaccatcttgatttagaaagcattacagctgttaacgatggattagcttcattcaaaggatcaattatctttacttcatatgactttgaatttattaacacaatcgctaatcgcgtgattgatttaaaccaaccaggtagtttatctaaagaattgccatatgaagaatatctaaaagaaattggtgtgttacaaaattaaaataataggattttaataaagcatcttctatttttaaaatttagaatatgcataacactgtcgctaaataacgaactttagcgacagttttttttataaaatactattattttcgaattattgttattatttatacaaattacttattattactatctcttttctttaacagtaatattacttcaataattttcagtttatttcaaaaaatcacaataatcggtttacagttaaaaggtgcttatgtataattaaaaacatagtaattgaataagaaattgatgaggcgcatcaatcattagtatatattagaacactgtctgccacggctaatatagaaagggtgcgatgccgaaacgaattgcaaccgcagtaagcgttcgttggactttgtggttaagagctgagagtttgtcattattatttaataatggagtgcatcacttgtatataaattacgagcaagttcgcacattccgaacttgctcttttttatgacgtgtgcccctaaattctaggaggtaaaatcttgaaacgacgtgttttgaagttcggtggttcatctgtcgccgattttacaaagataaaaaatattgcagaaatgcttaaacgccgtgtagatgacggtgaacaacttattgttgtcgtaagtgctatgggcaaaacaacagatcaattaatggaaaatgtttctcatcttacaacaactccaaaagatgaagaacttgctctattattaacaactggtgaacaacaaacagtttcttatttgtcgatggtattaaatgatattggcgtaagtgctagagctatgactggatatcaagcaggtatcaaaacagtaggtcatcatttaaaaagtcgaattgcagaaattaatcctgaaacatttaataaggaatttaaagacaaggatgttttagttgtagcaggtttccaaggagtgaacgacgaattagagttaactacacttggtcgtggtggttcagatacgactgctgttgcattagcagctagtaatcaaatcccttgtgaaatttacactgatgttgatggcgtttatgctactgatccaagaattttgagtgaggcaaaacgtttagattatgtgtcttatgaagaaatgatggaaatgagtgctttaggtgctggtgtgttagaaacaagaagtgtagaacttgctaaaaattatgatatccccttgtatttaggtagaacgttatcaaatgtgaaaggaacatggattatgccaagaacagaaatattagaaaaaaaagccgtaactggagttgcattagatacacatatgatgcatgtaacaattagttaccctcttccagataatcgccttctaactcaattatttactgctttagatgaaggttcagttaatgtggatatgatttctcaaatcgtaaatgttgaaggtttacaactatctttttctattaaagatagtgatgtacaacaaatttcaagtatcttagaggaactttctacaacatttgatgctttagattataaaattaatgaagcttacgtcaaaatttcgttaattggttcaggaatgcgtgatatgtctggtgtagcttcaaaagcatttattacgttaattaattctaatattccattttatcaaacaacaacttctgaaattagtatttcttatgttattgatgcagaaaatggaaataaagcggttgaagttctatacgatgcttttgatatttaaacttaagttaaaataagtaattcaaaattcaattaatatttaaatggagtgattcttttatgacaagattagcagtagttggagcaacaggattagtcggaacaaaaatgttagaaacaattgatcgtaaacatatccaatttgatgagttggtattattctcatcagcaagatcagcaggtaaagaaattgagtttcaagggaaaacatatacagttcaagaacttacagaagaagcagcaagtgaaaaatttgattacgtgctaatgagtgcaggtggcggaacaagtaaacaatttgcccctattttcgaaaaagctggagcaattgttattgataattcaagtcaatggcgtatgacaaacgatgtggatttaattgtaccagaagttaaccaaccagaatttaaacgtggtatcattgctaatcctaactgctcaacaattcagtcggtcgtgccacttaaagttttatacgatgcttttggattaaaacgtgtagcttatacaacatatcaagcagtttcgggttcaggggttaaaggtaagagagacttagctgaaggtgcgaatggtaaagctccagaagcttatccacatcctatttataataatgttttaccacatattgatgtttttttagaagatggatatacaaaagaagagcaaaaaatgattgatgaaacacgaaaaattttaggacaacctgacttacgtgtgactgcaacatgtgcacgtgtacctgttcaagatagtcatagcgtagaaattgatgttactcttgataaagaggcaacagttcaagaaattaaagatttatttgaaaacgataatcgtgttgttttagtagacaatcctgaaaataatgaatatcctttagctattaattcaacaggtaaagatgaagtgtttgtaggtagaattcgtcgtgatgactcacttgataatactttccatgtttggtgtacttcagataacctacttaaaggtgcagctttaaatgcagttcaagtgttagaacaagtcattaaattaaaaggagctagataatatggcacatatttttgaaggtgtaggtgtagcgcttgctactccatttactaataatgaagttgactataaagcattagaacgacatgttcaatttttacttgataataatgttaaagcaattattgtaaacggtactacagcagagagccctactttaacagaagaagagaaagaaaaagtacttcaagcggtgattaaacaagttaatcatcaagtggctattatcgctggaactggtacaaataatacagctaaatctattcaagcttcattacgtgctaaagaattaggtgtagatggtattatgttaatcacaccttactataataaaacgaatcaacgtggcttaattaaacattttgaaaccatcgcgaatgaagttaagttacctgttgttttatataatgtaccttcaagaacgaatatgacaattgatcctgaaacagtcgaaacattaagtcataatgattacattgtagctattaaagatgctacaaatgactttaactattacgaagaagtgaaaaaacgtattcatcaagatgaatttgctttttacagtggtaatgatgataatgtcgtagaattctataatcgtggaggtaatggcgtaatttctgtcattgctaacgttattccgaaagaatttcaagcactttatgatgctaaacaaaatgggaaagaaattgagaaagactttgaaccgataggtcaattgttagatgcactttcagttgatgtcaaccctattccaattaaagctctaacaagtcatttaggatttggaaattatgaattaagattacctttattaccactagagaaagaaaaagcaaatgtattagtgaatgcttataaagcatttaaaacggaggaataaaaatgaaaattttactcattggatatggcacaatgaatcaacgcgttgccagattagcagaagaaaaaggtcatgagattgttggtacaattgagccagaagaacatcaacattcaccatataaagcttatcatcatattgcagacgcacaaaatgaagccgatgtagcgatcgacttctctaatcctaatctattattacctttattagatgaagagtttgaattacctttagtgattgctactactggtgaaaaagaaaaactgattcaaaaattagaacaattaagcgaacgtatgcctgttttcttcagtgcaaatatgagttatggcgtccatgcattaactaaaattctagaagcagctgttccccttttacaagattatgatattgagttaactgaagctcatcataataaaaaagtggatgcgccaagtggcacactcgtcaaactttatgatgttattaaagaattacgtgaaaatgtaacgcctgtttacgatcgacatgagcgaactgaaaaacgtgaaaaagatgaagtcggtattcattcagttcgtggcggtacaattgtaggcgaacatgatgttttatttgctggcacagatgaaacaattaccatttctcataaagcgcaatctaaggacatttttgcaaatggcgcaattacagctgctgaaaaattaaacacaaaatcaaatggtttctatacatttgacaacttataaaataacttaaggagactctaaactatggtacaacacttatctgcacaagaaattattcaatatattagtgatgctaaaaaatcaacaccattgaaagtatacgtaaatggacaattcaatgacgtcacttttcctaatacatttaaagtattcggatctgatgattcaaaagtaatattttgtgaagcggatgattggaaaacattttatgaaaccaatcaatcacatattactgacttagaaattgaaatggaccgtcgtaattctgctattcctttaaaagacttaactaatacaaatgcacgtattgaaccaggttcattcattcgtgaacaagctattatcgaagacggtgccgttgtgatgatgggagcaacaatcaatattggcgctgttgtaggtgaaggtactatgattgatatgaatgcaacattaggtggtcgtgcgacaacaggtaaaaatgttcatgtaggtgccggtgcagtattagcgggcgttattgagccgcctagtgcttctccagtagtaatcgaagataatgtattaattggcgcaaacgcagttattctagaaggtgtaagagttggcgaaggcgctattgtagctgctggtgctatcgtgactcaagatgttcctgctggtgcggttgtagctggtacacctgctaaagtcattaaacaaacatctgaagttcaagactctaaacgagaaatcgttgcagcgttaagaaaattaaatgattaatgacaaacttgaataattgaatgctaaaggctgggacaacatgttctcagcctttacgattaaataaatacataagttgaataataaatgaataaaggattgattaagatgagcgaattagaatttgtcacacaacatagaagacatttacatcaacatccagaattaagtcttcatgaatttgagacaactcaatatattactcgatttttagatgaattaaatgtatcttacgagcaacctcttgaaacgggtgctattgcatatttagaaggtaatagtgaccatacaattgcttttcgggcagacattgacgccctacccatttttgaagaaaataatgtcgattatcgtagtcaaacagataatgtgatgcatgcttgtggtcacgatggtcatacaacagcattgatgttatttgttaaacgatgtaaggcgatggctgatcaacatcaattacctcataatgtcgtgtttattttccaaccagctgaagaaacaggcggaggcgcaaatcgcttaattaaagccggtgcttttaatcaatatcctattgaagcagtatttggcattcatgtaaatcctttcgctgacgaaggacaagtcgtgatacgcgatgaagaaattacagcaagtgccactgaatatcgttttttcttaaaaggattatctagtcatgtagctgataaagagcaaggtcattcatgtggcgaagcactgattcatgttttaaatcaagttggtcaaatacagcaatatcatttaaatggactaaaacgtaatattgttcatatgggccactttaatgcaggtgaagcaattaatacggttcctagtaatggttatttagaaggaactattcgtacttatgatgccactgatttaaatatcgtgaaaaatcaaatgaataaaattgcaaaaagtgtgaaattattattcaatgttgattgtgaagtcaaatttgaagaaggatatcctgctacaatgaatagtcctaaactacgtcatatcgttgaacaatctattctatctgctaatttagaagttattgaaaagcctctaccatttttattcggcgaagattttagtttttatggccaacaattggcgccatcttactttgcttttgtaggaactcgaaatgaagataaaggctttatcacaggcttacatacatcgcatttaaattttgacgaaaaagtgcttattgatgttgccaattactatgaacaaatattgaaccattatggaaaggagtaaattaaattgacagcagtttggtcagttgattcaaaaatctttttaagaaatgcaactaaagtaaagaataatcaatcaataatggcagttgtaaaaaataatgcttatcattatggattagagtttgcagtaagaacatttttagaagcaggtatccatacatttagtacgacttccttaaaagaagcagtgagagttcgtaaacttgcacctcatgctacaatttttttaatgaatgcagtttatgactttgatacagttcgaaataataatattcaaatgacgcttccctctttagaatattattatcagtacaaaagtgaattaaaagatattaatgttcacttagaatttgaaaatttactccatcgttcaggtttcaaaaatcttgatgaaattaaagaagtacttcatcatcatgaaaatgataatggaagtgaaatgaatatcgttggcctatggacgcattttggatatgcagatgaatttgatgttccagaatatgggattgaacgtgaagcatggttaaacgtcgttaatacattattaaatgaaggataccaatttgaacttatccatgcacaaaatagtgcgagttattatcgtgaaggacaacaacttcttccctatcatacacatgcacgtgtaggtatcgctttatatggttcaagaccatatagcaaattagatgaacatgagattgaacaagccttaaccgtaaaaggaaatgtaattcaagttcgtgaagtaaataaaggtgattattgtggttatagttttgcatttgaagcaacgcatgatcatacacatcttgcagttgttgatattggctatggtgatggtattttaaaaaaacgtgcaacacacgaagcattaattaatggtaaacgttaccctattcgagcattaatgatgagtcatatgtttgttgaagtcgatgatgatgttcatgcacaagatgaagtgatactatataataatgatatacgcattgatgaatacacattcaaaggtgttggcgctaattcagaacaacttagtgcgatgaatcatgattctcttataaaggagtttagataaaatgtcagttaaatataatgattacggtgaattaacaatggcgggtacaagtttgaaaacactagctcaaagttttggtacgcctaccattgtttatgatgaagatgaaattcgcaatcaaatgcgtcgatttcataatgcttttcaaaaaagtggattaaaatacaatatttcatatgcttctaaagcctttacttgtattcaaatggtaaagttagttcaagaagaaaacttacaattagatgtcgtatctgaaggcgaactttatacagcattagaggctaaatttgaccctagtcgcatccacttccatggcaataataaaacgaaacgtgaaatacaatatgctttagaaagtggcgttggctactttgttattgattctttagaagaaattgaattaatcgatcgctatgcaagtgatagagttaatgttgtcattcgtgtgaatcctggcgtagaggcgcatacccatgaatttattcaaactggtcaagaagatagtaaatttggtctttcaattcgccatggtcttgcaattcaaggagttgaaaaagtcaaatcatcaaaacatcttcatttaaaaggaatacatttccatgtaggatcacaaattgagggtactgaagctatgattgaaacagctaaaattgttttaaattggcttaacgagcatcatatccaagttgaattacttaacttaggtggcggttttggtattaaatatgtcgaaggtgatgtaagcttcccaattgaagaaggtattgctgaaattacagatgcgattaaatctgaatcagaaaaattaaactatgacgttcctgaaattggtattgaaccaggacgttcaattgttggcgaagcgggtattacgttatatgaagttggaacaattaaagacattcctgaagtaaataaatatgtttctattgatggtggtatgagtgatcatattagaactgctttatatggagccaaatatcaagcattacttgtaaatcgtcatgagaaggcagacgaaacggtaactattgccggaaaattatgtgaatctggagatattattatccgagatgctatgttaccttcttctgtaaaacgtggagattatttagccattttatctactggcgcataccattactctatggcatctaattataatcaaatgcaaaaaccacctgttttcttcttaaaagatggaaaagcacgtgaagttatcaaacgtcaatcattacgtcaattaataattaatgatacaaaataaaataacgagaaagtttatatttacccgttcaagttgcaccataataaagaagccagtaaaagagtttttaaaaactcttttactggctattttttctgagatttatgtcccagcctcatttatatataaaaaacaccctacatcttggtaaggtgttactaaagtcaatttttgcaatctataaattatagtttaacaacgtttgcagcttgaggaccgcgatcgccttcaactacttcaaactcaactgattgaccttcttctaatgatttataaccttcttggttaattgctgagaagtgtacgaatacgtcgttttctccttcaacttcgatgaagccaaaacctttttcagcgttaaaccatttaactgtaccttgtttcataattgtgaaacctccaagactaaaattcattcaatatgcattattcgcatattacaaaaaatacgtgttataaatatgtataaataacaaaatgctatcaatcaatattacagatattctttgcaatatggaataaaactattgcttgataactattatatgttagtttgaaataaattgcaatacaattatagaaaattctcttttaattaatttttggtagattataataaacttctttattatttaaaacaataaaactataaaatatttgtaaatcttcatcacaatcttcacaaaaatttaaatcacaattattataaaatgcataaatattatatttcccaataacataattattataatattttttactttttttaataattgattgataatcttctaacatttcttcatagttactataatgatgttgttctacgattttttctgtccagtcgctaaataaccaccatccctcgtagtcagcacgaatctttgcaactgtccacatgactaagtcccctctcaaattaaaactctaataaatattgtaacttttttttagacgaattcaagcttaaagacttcgttcttttaattgagataaagatgatatgtatattaattattagttttttataggaaaaatacgtataatataatgtagaggtgataatgatgcaacataaacatatacaagtatttggaattgtccaaggtgtagggttccgtcatcatactgaattaattgcaaaaaaacttgatatatttggtactgttcaaaatgttgaggattatgtagatatatatgctcaaggtgacgaggaacaaataaaatcatttattgataaagtgattgctggtgcttctcctgcatcttcagtttctgattatagtattgaagatttagacgtaacaaatagatactcagaatttaaaacgatttattaaataaaggaagatgaatattgagatataacctttctcggcttctgggtgttttagtaggaattccaatagctattatctcatgggtgacaagtgtatttggatttgatttatcctttatacttgatgccctaataggtattggaatgttttttgtatcttattttcctactcaaagattgacatccaaaaaatatttaaatgaaattggattatcacgtagagactatcgttttgttaatcaacaactcaatcaatcacataataaaattcgtaatattttaaaatcatatattaatatcagatcgattaaagattttcgtcaaattaatgatatatataaaatttctaagtctattcattttgctgttaaacagagaccttcatcattttttaaagtagaaagtttcttttattcgcatatagataatgcactaaatttaattgatgcatatacccgtttatctaaaatgccaaaaaaatctgctgaagaaaagcaaaaattagagcaaacacgtattactttagatgaggtaaaacgtacacttattgcagatttaaaaagacttaatgaagatgattatgagcgtttagatattgaaatggaacttaatcggttacaacacaagcgatataaaaaataataatttaaatttaagataagaatggagagaatttttaaatgaatcaaaaagaccaatttattaactcacatccattagatgattatatagatcatcaaacgcatgatgtttcaactcaaaatgttaagcaagactttgaacaacaatttaacgaacaagatttaaaaaaaattgattcaattagtcaacaaatcaaaccactagatagtgaaggcttattatcttttgggacacatctacagcaaaacatgtctcaattttcacatcaaatgttagatgaagttcaatcgaaagatgtgggtcctattggtgatactttaaatcaattaatgtctaagttaagagaagttaatcctgatgacttgaatcaagacaatcaatctaaacttaaacgtttatttagacgaacaaaagcttcaataaatgaagtattctctagaatgcaatctgtaagttcacaagttgatagaatcaccattcaattggataagcataaaggaaatttgactaaagacattcaattactcgatcatctttatgaacaaaataaagtatattttgatgatgtttctctatatattgctgctgcacagcgtaaaaaacaagaaataaatgctaatgaattacctaaattgcgtcaacatgcagaacaatctggtaatcaaatggatattcaaagtgtcgctgatatggagcaatttgttgatcgattagataaaaaaatttatgacttacaattatcacgtcaaattgcaattcaaacagcgccgcaaattcgtatgattcaaaatgtgaatcaagcattagctgaaaaaattcaaagttctattctcacaagtattcctttatggaaaaatcagatggctattgccctcactttaatgagacaaaaaaatgctgtaacagctcagcgtgcagttactgataccacaaatgatttacttacacgaaatgcagccatgttaaagcaaaatgcaattgaaacggctactgaaaatgaacgtggtatcgtagatattgaaacgcttaaagcgactcaaaatgatatcattgaaacgattgaacaaacactgcaaattcaatataatggacgtcaaaaacgtcaacaagctgaaagagaattatcacaactcgagaatgaattaaaagaacatttacttactatgaaaaaagaatagataaaattaaaacaccgattgctctcatttaaagaagtaaccggtgtttagtctatctattccttttgataaacaatatacgattgatttataaacttagatacgatataccctattatgattgaaatgatagctataggtaaccattctaaagaatattgcttaaggggtaaatgatttataacatttagttttattaaacctaatgtatttattgtacttacaattgaaacaagactaacaataataataggtatttgttgcgcaataggtttagttggaataaaacgcgcaagtaaaattaaaataatcatagtaatggctacaggataaataatacttaacacaggaacagacatgtttataacagaatttaatcctaaattagccaatataaaactgataattgtaaaacctataacatataccttataactaatttttgaaaatatactataaaagtattgactcacagatacaataagtccacaagctgtagttaaacaagctaaagcaacaatgatacctagtaagtattttcctagaataccaaagccgtttgtagccatggtagtaagtaaataagttcctatattttgatttttagccattagagatgtaatcgtattttgacttattcccatatgattaccaatatagcctaaagaaacatatataaaaattaaggctgaagcggcaataaatccagctataactgtttgtttaaatatttgattggtgtgtttaactcctgttgctttaatggcattaaccacaatcattgaaaatgcaattgctgcaattgcatccattgttaaatacccttcaataaagccgtgtgaaaaactttctatatttgaagaatatatctctggatttccatgagatgaactgtgtcccttataatctacaaatcctttaataatcatggccaaaattgtaattaataataaaggagttaataaagatccaattcgatctactattttaccaggattaatacataaatataaaacaacaataaaataaataagtgtaaaaatgaataaagacatattactatttgaatgcgtaatgggtgtaatagtcatttcaaaagacgtagatgcagtacgtggtatagcaaatagaggtccaatggttaaataaataataatgagaaagataactgaaaatctcggtgacagtttattaaaggcaccaatatatccttgtttatcaagtgccccaacgactactccaagtaatggtaagcctattccagtcaaacaaaaagctaaaattgctggccagaaataggcaccactttcttgtcctaaattaggaggaaaaattagattacctgcgccaaaaaacatagcaaatagcgtaaagccgataatccaagtatgtttattcatagaattgctcctttttatgtatatgtttgcaatatttaacattctagcacaaaaagaattgacaagtctatgtatgtcacaaaaatttgaatattataaatcaatatacagtttaattattagaaagattttaataataatttttttagcaatggtgataagtgactcggtaaattttcaacaccttctacaaataatgcaaattgtccataaatattatgaatggtttcttcaatatcttcagtaataggatcttggcttaaaaagacattaaatacttcgattccaaatttacgcgccatttccacagcttcatacgtatctaaaataccgtcttgagcatagttatacgctgaaggttccccatctgaaaagataattaagaaacgttgttgatgacttcttcttaataaacgttcacttgcaattcgtatagctacgccatctctattatcatcttgaggatgtaatgacataatgcgtggtccgcttttttccatgattgaacgatcgtaatgaacgatttcatcaatgatattgggttgttttcgatcatcagagtcaaaagcatcttcattaaaagcaagtatctcatgtttaacgttgagtgcttttaatgtttcatgaaataatacgacgcctttaatcgtttcttccattttatcaaacatactagcagatacatcaatcagtaatgtaaaagtcgcatcgaatgttttactaaggtcttgttttttataaaacaatttatattgatcatcaataaaccaattggttaaatcacgttgaagacgacctttagtcaaattatgacgttcgtcaacatgttctctatcgatggttttctttataatctgaattaaatctttagtttcaaattgtacttcatttttaacttgctggtagcttgaaatatactctggctctatatcaggtactttccattctatttcgacattttcattaataccacgtaaagcaaatgatggattagaacctatagaaccgccttcatcacgatcaagtgcatgattagagccacgtccttttttcgtcatcatatctgtcatatcatcagttgaatcaccttcacgtgcagtgtcgttatcactcataacatcactattttcaccttcatgtaattccatttcaagataagcgccaccttcagatttactatcttgagcgtttgtttcagcttcggctgatgtagtgtcagtttcttcgtttgtattatcttggccatcaacattacttgcatccatacgtttaatatcctcgtaagacatttcatgaatagcttcatatacttttctaggaagatgataatattcatttaacatgtcatgtgataacatttcatcgatttggaacatgacacgttgtgcaagatacatattatcttcagatgattcattttggaaaaaatcaggtaaatattgaaacatgtgatttaatatgtcatctaattgtggatgtatcgtgggtatatcaaagaagttttgacttaaaaatgcgcgctctaaatataagaaaagtaaatctgtatataccgtttttgttttatagaatttaatttgtgattccgtataagataatcgagttttcactcttaaatcaatttgtttagcagtgctaggtcgctcctctttaataaaattaaaaacgcgcatatcttctagcaatctaaagagttgatgataaaatttagaatggctaaattcattatcatgaagaacttcatttacgatagcttcgtccatcattttataaccatatgcagcgagcatgacatctgtttttaaccctgcactttcaatatcttttggacgatgagaccaaaaccaacttgtaattaaagtattattaataggatcataataagggaacttttgaatttttactttagtttgttcgtttttcagtagtaagcgcgctaaatcttgtaacatcatgacttgcttagcatctagctgctcatcattaaattttataaaacgatcactcataataatccctctctaaaagtttagttcgattgcatttctgatggcttgctgttcgcgttcatcttcaagtttatcgataattgtacgctgaattgctctctctattggcataactgtaattaagtcacttaagtcaattaacgcacgaatactagctgcttcttctgaaatttgtccttgttttgacattgtacgtaagtcttcattaaatttaatgatttttttaattatatcatcatcttgaagctggctttgttgtttaatgacatctttaagaatgtctcctccaatgtaatcaacttgtatgacaataaagcggttttttaatgcttcattcattggtaatgtaccaacatagccttcatttatcgcagcaattacattgaaaccaggggctgctttaattacttctccagtaaatggattggttaactgacgtctatagtctaatacgccatttaaaataggtaatgtttcaggtttagccatattgatttcatcaatatataagatatgaccttctcgcatggcttttataactgggccgtcaataaaaataatttcttgttgaccttgttcatttgtttttattgttttaaaacctaataagctctctgcgtctaaatcaacagaacagttaacttgatgcatcggcgtttggactacttcacttaaagtttcagctaatcgtgttttaccagagcctgtagggccttttaataaaatatttttatttaaattaaacaatgcttgtgcatcattgaatacagattgatctgaattgatataatgattatttggcattttaatattctcctttataagatgaaaaaatagaccaagagcgtgtataaatgtatagatattggtacatcactctgagtcttaatttaatcgttatcttttagaaattgaatgtatttaaacttctttaaaataatctttgtaataaccacctactagaccagagttatcaatgatttgataatattcttcagtttcattgatgacatcatattgctttccaatagtaagcatatctgatactgtgaatttttttgcatcagtattaactaccatcacttgtttaattggtgtgcgtgatttccaatcttcatgtaacattgccattttaaatcctccaataaaatgaattatattattttttttctaaagtatatatgaaagagatgccgctaccttcagtaatgcgtaacgattgagcatcaccttgatttaatatttgataaggaataccaatttcatccagttcttttcgtgcatgttcaaagtcttcagttgaatttgtactgaattcaatttgttccacaattccttcttcttttaattcaacttgttcattagattgatataaatgaatttctccaccaagtccaccatctccgattttaaatacctggacagtttgatcaggaaattcagtagattcatattcagcataatgcgttaaattaaatacatttttaaagatagaagttgtaaccaataattcgtttactttaataattactggtcccaacccttgaatttggtgaagaggattaacagcactttcaaaagtaggtgtgcctaatccaataccaacattcagttcattagaatagatatcaaaaatttgatgattatcatctttaaaattaaagtgctgattaccgtttaattcagtgattgaactaaattgaatattatttttttctaatatttgttggtattcttctaaaccagcattcgatggtgttcttaatcccacgcttgatatatgtacatttctataattaggattaggaacttctacaaagtgaagtcttgtaccaggatttaattcagcatcaccaaaacgtaatgcctgtctttttgttgcaacattaagacctaaaatattatgaaataaattctgtgtttttgagagatcacttgttccaatcgtaacacttcttagtccactcattcatcgacactcccatttatatatcttttcttaaacattataacgtattttatatatgaataatatgttgaacgcttaaataagagtattgttttttattataaaatatacgtaaataaaaatattataaatgattaaagtttgtataataaataaaatatatataagataatatatatgttatacccctcccctaccttgttttataaaggtagggggggtgtataataggttatttaattgtctaaaaacaaacttgataaattatataaagttcgtttttaacttattgtagttttaataattattattttttaatagattcttttgtaatactcttaagaatatttgttgttttttgtccaaatataatacttaatttatcatttttatacatgttagcatctgctttggaaaagtcataaatggataatgagggatgcgcttctctgctattttttatattctcattattaggatacatttacgttatcttcttttatttctatattacatacttatttttaactaatgataatatcgaaatattctagcgtaatttttttaatgctaatataactaaaacttaaaaagagtagaataaattcattatgaacttattctactctttatcaatttatgattaagatttcaatatatttagcgctttaataaatgaaattaagattctaataataagtcttctgggctctcgatcagctctttaattgtttttaagaatccaactgcttctttgccatcaataattctatggtcatagcttaatgcaatgtacatcattggtctgttctcgattgtatctttatcaatagcaattggacgagtgataattgaatgcatacctaagatagcagcttgattaccattaataattggtgtactcatcatagaaccaaatacaccaccattagtgattgtaaatgaaccatttaccatatcatctaatccaagttttttatcacgtgcttttactgctaaatctgcaattgatttttctagttcagcaaagtttttcttatcacaatctctaacgaatggtactaataatccatcatctgttgaaacagcaataccaatatcatagtattgtttagtaatcatatcgtctccatcaatttcagcattaacttctggatattttttgagtgctgctactgctgccttagtaaagaatgacataaatcctaatttagtgccgtcatgatctttaataaattgttcttttttacgttttcttaattccattacatttgtcatatcaacttcattaaatgttgtgagcattgcggtattattagatacttctaataatttttttgcagctgttttctttcttctagacattttttcacgaatcactggtttattaggcgtattagcagttgattttttagatgtttcttgttgtgaattaggttgagtattttgattagattgacttgttttttgacgattatcaacatcttcttttcttatcacatcgctaccttttccagctacttcatttaaatcaataccatttttacgagcatgacgacgtgctgatggtgttgcattcactcttttattattgattgattctgagtcgtcatttgaacttgtatcgctaccttgtgcttcagtagaagtgcgtggtgttgaatgattagtttctgcagaatctgtttttatgttttcattttcagaagttgaatcgttattttgtgatttgcttgaactacttgtactacctttaccttcaccgacaattgcaatagcttggcccacttctacagtgtcgccttcagatgcaagttgttcttgaagtataccatcttcttcagatacaacttcaacattcactttgtcagtttctaattcaagaatagcgtctcctttttcaacattatcccctatgttttttagccactctgcaactgtaccttctgtaattgattctgctaattctggaacttttacctctgccattatatttccccctagttatttttgacactattttcaataattttatgttgaacaagtttgtgaatttctccatcaccttcggcaggtgctgcacgttgtattctaccctgataacttaaattatattgatgtccaacaatagatttaagatatgggtaaacaaataaccatgcgccttggtttttaggttcttcttgaacccaagcaacagattctaaatttggtaattcttctaaagcttttttaatgtcttcctctgggaaaggatataatctttccacagcaataagttgtatattttcattaggttcttttgctaatgtttcttttaaatcaataaacatttttccagaagctaaaatgacttttgttactttagctttttgagcatcttcaacaataattggtttgaaactgccagttgtaaattcactaattggcttagccactgttttatttcttaacaaactcttaggtgacatcacaattaatggtctcatcgcttcagtatttaaacttttagcttgtgcacgtaataaatggaagtagttactagaacttgatagattgaccactgtactattattttcagccgccagttgtaagaatctttctaaacgtgctgatgaatgttcaggaccttgaccttcaaaagcgtgtggtaagaataaagttagaccactacgctcgccccatttggctctggcagatgacataaaattatcaaaaatcatttgtgccatatttgaaaaatctccatattgggcttcccaaatattcatactatttttattttcaacattatatccatattcaaagcctacgactgcagcttctgataatggactgttatgcacttcaaatgttgctttttgatttggtacatggtgaagcggtgtatacgtattgccattgtcttcatcatgtagtacagcatgtctgtgactgaatgtgccacgttcactatcttgacctgtcaaacgaattgatatgccatcttgaacaattgttgcaaaagctaattgttctgcttgagcccaatcaactaggccattttcattttcaaaaggttctctacgtttttctaatactttatttaattttctaaatacctggaaatcttcaggatagttcaacattgcatcattaatttctttcaaatgttcaaagctaaactcttttttatcactttgtaaaggtaactgaagcgattcaggtttattcattacagtactattcattttatctgatttatcaattttatcttgagcagtacgcatttctttttgtacagaatcaatgatttcagacatttgttctttcgttaaaataccttcatctacaagtttatttccataaatcacttcaactgaatcatgctgtctaatattgtgatataacgttggatttgtaatagatggttcatccatctcgttatgtccatatcgacgataacctactaaatcaatgacaaagtctttatggaattcttttctaaattccatagcaatatcaattgcttcaattgtcgcttctacatcatctgcattcacatgaagaataggtacatcgtaccccttagcgatatctgatgaatacgttgtagaacgaccatcaataggttcagttgtaaaaccaattcggttatttgtaattatatgtagtgctccgccagttgaataaccatttaaattacttaaattcattgtttcaaaattgataccttgaccaggatatgcagcatctccatgaataataattggcataccgtgatggaaatctgtagttggtccacccgcatgatgtgtatcatcttgagcagcacgtgtttttcctataactacaggtgctacaatttctaggtgacttggattgtttgctaaagaaatacattgttcaataccatatgaagaagtagttttaacgccacctaagtgatatttaacgtctcctgtccaaccagcagtaagttttaaactgccatctttaggtaagaatttcattggatccgtgtgcataaattctgagatcatcatttcataaggtttttctaatacatgtgttagaacattgagacgtcccctatgtgccattccaatttgaatattctgaatgtcctcttgagcagcacgcttcaatgtatgttgtaacattggcactaatgtatctacaccttcaattgagaaacgttttgctccaacaaaattcttatgtagatatttttcaaaaccttcaacatgagcaagtgttttaaataagttaattttttcatcactattaatggtagctttataaggtgtttcaatacgacgttttaaccaagtacgttctttattattgttaatatgattgtactcaaacgcaatagagcctttataacgcttttccatacgctttaacgcttcataagcattatcgtatatatcactaaagtgatctgatacgataccagatgaaatattttttaatgtctctttatttaaattaaaatcttcaatttctaattttgggatatgcgttcttttaggcgcatttacaggataaatatcagcctttagatgaccatattgtctaatattatcaattaatcgcatgacacgtttgattgtgctatcatctgctgaagtaccactcccatctgtggtaaacttagctttaacttgtgcttcgccattttttattgtactaaaaagcacttgtaaatcatctgagacagaagttgggtcttgaagataatcatcatataaatcgagcataagacccaaatttgccccaaaatttactggagcttctgtaacatcccttttatcctttgccatattataccctccacaaaatagttaaaccgcttacaaaaccatcatagcactattttaactattgataaagactattgactgaatattatgtaaaaagaaaaaattcaataaagataaacttttttaattttatattaataaaaaaacacagatgataatcatctgtgtttttatttaaaattgattttgaatgttgtgaatttattaagttcactatctacagaaatgtaacctccatattgactcacaatcttttcggcaattgaaagccctaagccattaccaccttggcttcttgctctagatttatctactctatagaaacgatcgaaaataaattcttgatcttcttttggtatgcctaagccatgatcggtaatttcaatacttatttgtttattacgcaattgtgttttaatacatatatgctttctctctttatcatatttcatagcattgtctataaaaattaagattaattgttcaaattgatgacgattaatttgtaaaactaaaggtttttgttctaattcaatctcaaatagataatctggatgcaattgttgaagtgccttaattcgtgattgaatttcttcattgatatcaacgtcctctttttctaaggattgcatatttactttatctttggttaataataataattcttctactagctttgtaattcgattcatttcttctagtgaaatatttaaagactcttctaaaatagcaggatctttcttaccccagcgtttaattaaatttaaatggccttgaatgatttgaagtggtgttcttaactcatgagaagcatcttcaacaaattgtctttgttgattaaaagaggcttcaatttgatacatcatttcgttgaaagtttctattaaattgtctgtttcttcataacttgtatcaagttctaatttattttgaaaaccatcgcgtcgtatttgattcattttattagacattgttactagcggttttgtaatatttttagaaatgaaatagctaatacatgcagtaatcactgtagcaagtagaccaaaaacaacagcaataatataaagtgattttactaagttgttataatgctcaagagaatgaatgagtacgctataacctttaaagtttggactatgaagtggttcagtaataactaaatactcttttccattatttcgcattacttgaattcgatcggtcttttgtaaattattattaggtataaactgaatcgtactttcattagatgatttcattattctttgacctgtatgattgtaaataatgacttcttcataattttctaatgaagcacttaaatctaatatcgatatattattaatcggacgcgtttgaattaaattgacaatatcacttaaactatgttctgcttcatccacttctccttctcttaaagtatcttttaagaagaatataataataagacaaaataaaataattgtcgtaaacataatcaatgtagtgatagtcatccatttatattgtaatgtatgatttttcattatcgaatcacgtatcctacaccacgaacagtttcaatgactttttctttattgaaaggtttcaatttatttcttaaatatctgatgtatacatcaaccacattcgtttctacttcactattatatccccatacatgatttaaaatttgttcacgttgtagtacgtgattgcgattcgttgctaatagatacaataaatcatattcagttttagtaaaatctaattgcttaccatcaacagttactttaaatgcatcaatatctattctgataccattaatatcgataatatccttatgaggctgacgacgtaatacagcacgaattcttgcaaaaagctcctcaatttcaaagggctttactatatagtcatctgcaccataatctaatccagtcactttatcgtaagtatcacttttagcagtgatgataataattggtgttgattgcacttggcgtacacgtctacaaatttctaggccatttatatttggtaacattaaatctaaaataatcaaatcaaaatcgttatttaatgctttttctaaaccaggttccccatcatattcgatgtccaccttataaccctcatgtgttaattctaattcaagaaatctggctaaattttgttcatcttcgacgattaaaatattagtcattttttcagacacctcttttttaataaacgtatgacttctcataacataaccaatattctatcacaaaaattatttgttaatagaatgaataaaataaaagtaagattttaattgacaatcgttatcaataagttataatattaattgaaaatgattatcaattaaatctaagtttcccccataatttaaaatacttagaattataatcattttcaagccattccccccttaatttatatgtccgtaaatactaataaacgttcgttttaaaacgagacgtaaataataaataagtgcgccaaataaggcgcacttatttattatttataaggttgtaggctcatgtaatccttttaatactaaagttgaaagaacgatacagaaagcacctccaatgattcctgcaataatatcagttggataatgcacgcctaaataaactcttgaaatagaaatgagtaaaataagtgccgcacatagtccaataatgacgccttttgtacttcctgatgctctacgctgagcaatatacattgcacttccaaaaaatgaagtcgaacccattgcatgtccactaggaaaactaaatccagaaatatcaattaaacgtagtaatgttggacgttcacgatcaaaaatattttttagtaatggatttaatatacttgatagtgacattgtgataacaaaaaataaagcttcaattttgtaacgtttaagcattaaataagcaacaagcattaatgacaaacaaaccattgcccatacttctccaatttttgttgcacctaataaaatagatgtagtaataaaactctccgatgcataaataaattcatatacttcattatcaatccatttgcctaaacgtgattcatggaaaaatgcaatgatgccaaaaattaatgtaaaaacaatgagcaatgtaatgcgtttcgttctattcatcaattggtcctcctatattaaagcgcgtcgttcaagattttattaaataagtcttctttagtataactttctttataagattccatttgatgagtaatatcagtacggtgagattcaatttgttttaattgttcgagtaatttgaattgtgtaagttgatcttctggaatcatttttccatatcctttggattcaaaatatttagcattgtcaatttgatcccctctagattgatcaagccctagtggtatgagcaacattgggattcttaaagtcaagaattcatagatagcattagaacctgcacgacttacgactgtgtctgtaatagataataaatgcgttaattcttctttaacaaattcatattgaatatatcctttttgtttataagactcatctactaatccatgccctgttaaatgaatgatttgataatcatgtagtaaagcttcaagattttctctaataatatcatttaattttttactacctaggctaccacccataacaagtaatacttttttatctgaatcaaaccctgttatttcataacctttttgttgattaccttcttttaaatcttctctaatggttgcccctacaaaatcagctttatctttaggtagatatttaagtgtatcttcaaatgttgtatatattttttttgaaaattttaaagatattttgtttgctaaaccaggagttaaatctgattcatgaataatagtaggaatattcaatgaacgtgctgctataacaacaggaacagaaacaaatccccccttagaaaataataaatcaggcttttctttttttagaacgcgacgggcatctaagataccttttaatactttaaaaacatcttttgcattttcaaatgataaataacgacgtaatttaccacttgaaattgggtaatatttaatattcgaaagttgtgattcaatcatttctcgttcaattccgtttttagaaccaatataaaaaacttgatgtcctttttctaatgcagttggaattaaacttaagttcacagacacatggcctactgtgccgcctccggtaaacgcaattttagacatgattattaacctctattcttatatgtttttataatatgcatagaatggtgcgcctctatcgaatggatgatagtcaatttctgtttctcctactttttggaaaccaaatttctcgaataaaccttgagcgggtttatttaatgcaaaagtatctgtcagaatcacatggatatgatgttcttctgctaatttaactgcaaaatcaaataattgagttgctgcacctttataatctttagaaccagctaatctatgaataacataagcgttatttctatcaactggccattctaaatcatcataccactctgattgttgttggtcgacaacaataaatccataaatagtgttattttcttctaaaacatataacgtctctgtatcaatatcttccttaaaatgttcagtagctgggtatttatcgtcccactgattattcccaaatgatttcattaaatcttttgcttctgacactaatgtttcgatttgattaatatcttcatgtttacctagtctaatcatataatagttattcctttctattttattaattttaataatttgtctaagactgtgtcttctttatttgatttttcaactaataattgagtgaatttttcatttgttttggtgtcaaattttcccgtttcagatagttgattatctgattggaatagtttaatagcattagctaattgattatcaaattggtttgattcatctccgttataataacctaaagcatctaaaccaatttttatcgatttaacgtttttattattatcgccaacagaatatgttttatcagacggaataacacttaatgattgatacttaggagaatcaattgtaacatctggtctaataccttttccatgaatataatgatcatcaggtgttaaccatttcatttgtgtatattttaataatgacccatctttaagttctcgtgtggtttgaacgattcctttaccaaatgtttttgaaccatacactttagctttatggtgatctttcattgcccctgtaaagacctctgacgcacttgcggaaccttcatttactaaaatactcactttcatatctttaacatcttttaaagcatcatttgaagttttaattgcttctttatcattgcctttttcaagttgaacaacagtttgacctttatcaataaaaatattagccattttaactgcttcatctaataatccccctggattattacgcaagtctaagatgatatttcgaacaccagcatcatgagcttttataattgcagattttaattcacccgcagtattttgttggaatttagtaatcgtaaatacagctatgttaccttttttcttatactccacacttttgacatgaattttaccacgtttaatattaatatctttttcttcagaaccgcgtttaatagttaacctaacatttgtgccttctttacctcttaccactttaacaacttgatctaaaggtttacctactacagacttaccattaacttttgtgacaacatctttaggttgaaggccagctttttcagcaggagaatctttcataggacttgtaatcataatatctttatttttcttttgcatttctgcaccaatacctacaaaatctccagatacatcttcattaaagctctttgtttcagactttgtcatgtattcagaatatgggtcttttaattcttttaccataccattaattgcagcttcagaaagtttacttgagttttgttttttgtaatagtctgtatctaacgttttatatgcaaattctatttttttcatttcttgacgctcttctttagttaaaccacttaacttatgactgattcctatcgttgcaaatacagctataattgttgtaatgataataacacttaataaaattaagataaactgccatattttcaaatgcatcttttttttaggagatgcatgtcttttttcatctgattgtccgtcatggtgctcctcagaatgattattcataaaatcacttcctctaattacatcttgtctcttatcattttatataaagacatacctagtatgtctttatttttaagcaaacgcaaattataagaaattgtattcttaattagataaaaataaaaagagtggcatataaatctaaaattaagattttataacaccactccatatcatatttagacataaaatgaatttaaattagaattttaaccattctgtatattcttcatataaatcatcaaatacggacataggtaacgtaatgtcactttgcatttcgatatagtctgataatacgttgaagtcactttcatgttttggaaacgataagtcattgaaaatgtcttcggctaattcacctttatcatctttacgtcctctagccgttaaggcaaattgataaaatgaatgatctttcattagctcattgtcacatcgacaactttagtttcgcctttaataacagctttaacatcatcgagtgaaatagattctgtttgatcagaatttgtaataataataggtgaaataactgatttggcattatttctaataaattctaaatcgaatttgagtaaagggtcgcctacttgtactgtgtcaccactgctaaccagtacattaaatccttctccgtctaactgaacagtatctaatccaatgtgtactaaaatttcaagaccatttttagtttttaaaccaattgcatgttttgttggaaaaacattatcaacttttccagcaactggggaaactacctcaccttcagtaggattaataccgaaaccttcacccatcattttttgggcaaatacaggatctggtatatcttcaattttgacatattcacctgttaatggtgcatatagttgagtttccttattgacttctttatctttaccaaataattttttaaacattattcatcgctcctatttattaaaatgttgtatcaaatcgccatatcctaattcttctaatttttcgtatggaataaattgaatagctgcagaattaatacaataacgcaatccgccactttcttttgggccatcattgaatacgtgacctaaatgactgttagcatcttctgatctaacttcagttcgaatcataccaaatgatttatctacgagttcaacaatttcatcatcgtctaatgcttttgagaaacttggccaaccacaatcagattcaaatttctcttcagaagtaaataaaggcttaccagaaattttatctacgtatattcctttgtcaaaatgattccaatatttattttgaaaaggaggttctgtaccattttcttgagtaacgagatactccatatcatttaattcgcttttatcttttttaatcattttgagacccccaatgtgattctataaatgcttttctaccagaaccgcgttgatattgctcataatgcataggattttttttataatagtcttgatggtaatcttccgctggataaaagtttttgtaaggaagaactggtgtgatgattggttttttaaaaataccttcttcatttagttgttggatttttaattcagcagcttttttttgttgttcatcgtgataaaatattgctggttcatagctttcgcctctatcaaaaaattgccctttattatctgtcgggtcaaatagtttaaagtaaacatccaaaatattttcaaatgacgtaatatctggattataagtaatttgaactgcttctctatgaccagtttgatttgaacatacttgttcatacgttggattttctatatttccgccactataacctgatacgacatcttcaatacctgggtaagatgtaaagggtttaaccatacaccagaaacatcctcctgctaaagttgcatatgccattatattacctcctctatctttctttaaatttacgatataatgatatgaaattaaagtaattaactcagaggtcaataacttaagtcacctattattatctattatcctctaactacgacaagaccgatagcgccttgaccagtgtgtgtagaaatgactggtgtcgttacattaacatcataattttgttgtctaaatgcttcattaaattgatgttttactttttcaacgaattcaatcgtatttgcatgtgcaataccaatcgattgaatagtatgattttcaatgaatttagcaatttctttttttagatattgaatactagagttttgtgtacgagaattatgtacgatttctaaatatccctctctaagtgttcctatcggttttattttcataatatttccgattaaaccttttgttttactgatgcgtccacctttaattaattgattgagttggccaataacaacaaatagtttaatatttttctgcaattctgaaatatgtttaataatttctgcacttgaaagattagtgtttacaagttctactaaacgttgaatttggtatgctaatccaaaagaaattgattttgaatcaatcacatttacttttgcttcaatcatattgctcgcttgtaaagcagtctgatatgttccacttaatcctgaagacatatgaatgctaaagatttctacatcgtcattgtctttatcaagttgttcatataattcaataaatttaccaattgatggctgactcgttttaacgtcagcgtcttcttcaatacgtttaatgtactcctcggatgagatatctacttgatctacaaatgattctttatcaatggttaaatttaatggaacaacatggatgttatgttgatttaaatattcagctgataaatctgaggtagagtctgtaacgattacttgtttagtcataatttctcctgttaatttattttattttcgtactaaatgtaaaaaggtatgtggaatagtattttttccatcaagttgaccctcttcagaagatacaaccgtccaatcttcaaatgtatagggagggaaaaatgtatcaccttgatgttttccatctactacagtgatatacatatcgtcaactttatcaatcattacttcaaataatgtttggccaccgaaaataaatacatgaccctctaagttgtagatatcatcaattgtgtgaatcacttcaacgccatcaggtttaaaattgttatcacgagttaaaactacattttttctatttggtaatggtttgccaatggactcaaatgtttttctacccattacaagtgtatggccagttgagagttgttttacatgttttaaatcatttggaatatgccatggtagagcatttttataaccaatgacacgttgttgatcatgtgccactaaaattgataaggtcatttatcatatccccttttagtttatttttaattaaagatagattatacagcaatgggcgctttaattgctggatgagattgatagtctacaagttctaaatcttcataattaatatcaaagattgagtgttcagaatttatttttaatgtaggaggtgcaaaaccttctctagaaagttgagtcttaattgcctctatgtgattagaataaatatgtgcatctccaaaagtatgaatgaattctccaacttctaagttacattctttagcaattaaatgcgtaagtaatgcataacttgcaatattaaaaggcacacctaggaaaatatctgcactacgttgataaagttgacaacttaatttgccatcttgtacgtagaactgaaacattgtatgacatggtggtaatgccatagtatcaatttcagtgggattccatgctgaaactatgtgtcttctcgaattagggtttgtcttaatttgctgaataactgttttaagctgatcgaaatgattaccatattgatctacccaatcacgccattgctttccatagacatttcctaaatcaccatattttttagcaaaagtatcatcattcaacactttctctttaaattttttcatttcctgttgatacattttattgaaattttcatcttcttgagaacgatgtccaaaatttgtcatatctggaccatgataatcttcagattgaatatatttttcaaaagcccattcattccaaatattattattatattttaataaatactgaatattagtatctccttttataaaccacaataactcagtagcaataagtttgaaagatattttttttgtagtgagtaaagggaatcccttcgttaaatcgaagcggatttgatgtccaaatttagaaatggtacctgtatgtgttctatcatcacgttgattaccaatttctaaaatgtcattacataaatcgtgatacgccgaatcaaaaggattgagcatatgtacatctctcctaaattttatattaattatcattatactagaaaatagaaagatattgaatgaattatattatttcaaaacatttttatatttaaaaatctccaataataaattatcaaactgagataatttattattggagatgcatattaagatagattaatttaatataatcatattaacaattttcgtcgaaagcatctttaatatccatacaaatatcttgaatatctctaccttcaatatgttcacgcggaataaaatgctttaattctgtacctttaaataaagcatacgaagggcttgaaggtacttgttggatataatcgcgcattgtttgcgttgcttctttatcttgtccagcgaatactgtgactttatgtgttggctttttatcattttgatcagcaactgctacagcagcaggtctcgctaaaccagcagcacaaccacatgtagaattaataacaacaaatgttgtttcgtcatctttaacattgttcatatagtttgatacatcttcacttgattctaaacttgtaaaaccattatcagttaattcagaacgcatttgttgtgctagttcatgcatatattgttcatacggattcatataaaaaactcctttaatgtttattacgattagcaatttgtttccatacggaacctaatgcttcatcgccattttcaattctagaaattgccattttcacttgaagttttacttcgtaagcattgtcgtttgcatgcgctcttagagatgctagttgcgcttcgccaccttcttcaaataaaaacattgcagctctccaacgaacaattttttgtggatcatcaagtgctttttccatttctggcaaagcttctttataacctaaatcactgatacagtctccagctgtacgtcgaatagctggatgctgatcatttaatcctttatacaaatatggcaatatttctttactttcactcataccaaataaaacaattgcttgacgtcttaatggtaacttattttcatttagggcttgctctaagagtggaatatcctcaagtgttggtgttggaaattctgttaacattctgaggcgtactttccagtctgattcattcaagtactcctcgtatgaaacatgttgataaaaatgagatgtgcttttcgtttgtgtagataaagcttgaacgactaattgttccaatcgactttttggatataatgcaatgatttcttcataaacttcttccataactagagaaagttctccataacgtaaaccaagctctttccattttctaagaaaaataacattatcatcatcttcttgtgctttaagcatactattaataaagatatcaggtagttgtttacgtacttcttcatgagcatttgttaatttaatttgatatgggatatttttaaaagtgagtatctctgctttcacttctccatagtgttcatcaaactgagatgattgactaatagtttcctctttttgaagtgacgcagtaatttgaggtaatacctcttcccaatttgctttcggatacttatcaatagctaaaaagtcaattacatgaaatatagatttaacatctttaatttgtaataagtcattaataaaatcaggttgagatgttttgacttctgtatatgtgttcgactgattatcagcacgcttttcacttaaaacgattttcattgtatttgggcttggtgttggttcaatttttaatatttccactactgttcctcctaaaattaaaatgtgtcttcaattttaggtacaagatcatcccaattggcatattcctctttatctactgaaataaaatccatgacataaaaaactgactttactccttcgatatcaaataatcgattaataaaatcaggttgcccatcttgagcagatgtatacgtatttgattgattatctttacgtttttcacttaaattaattttaatcgtattataatttggtgtgtcttcaattgactttatatgcataaaattccctcctattgaagttcattgcctaattgcttaatttgcttacctattgaacattcagaaatacaaaaatgatgtgcttgtgtttttccttctgtttttctaatgtgtgttttcagtaaacatttatcacaataagtattcattaattcatcaattttttctattgcattttgttcggaatgtgtaagtataactttcactccttatacttaattttataaatatggagttattataacttatatgatgatcattttaaaataatcgattttattttttattatttataatatgaattgattaatgagtattgaatttgaattacttttactataaaatattaaagttgcttagcggtttctaaacacccgcattatcaaaatttaggaggaataaatgatgtataatgaattttttggtattgctactttttttgtaacatttattgtaatggttttaatgtatcgttgttttggtaaacaaggtcttatcgcttgggtagctatcggtacaattattgctaatatccaagtcatcaaaacggttgatatttttggtatctcagcaactttaggtaatgtaatgtttgcctctatctacctagctacagatattttaaatgatatttatggacgaaaagttgctaaacgtgctgtatggttaggcttctcatcaactcttgttatgataattgtaatgcaaatgtcattacattttatacccgcaccagaagatatatctcaaaaagcattatctacgatttttgatttagtgccgagaattgctttaggttcaattattgcttatattatagggcaacatgtagatgtgttcatcttttcaatgataaaaaaagttttccaatcagataaaacatttattattagagcttatggaagtacggtattaagttcaattattgatactgcattatttgtaactatcgcatttatcggtacattgcctgcaagtgttgtatttgaaatctttattactacgtatgttttaaaattagtctcaacgattttcaatgttccatttggttatattgcgaagtctttctatcgaaaaggaaaaattcaaaaattagacgaaggttattaaaacaatcatacatgcatattgtttaggtttactaagcatatgctatttttaaatagacaaatagtgtttaattaatgcttaaactagaggtgtttttaatggctaaaatattttttgatgctgcgacgagtggcaatccgggacgtagtacgtgtgggatagtaattaaagaaaatgatattaaatatacgtatacacatgatttaggagaattggacaaccatagtgctgaatggtctgcattcattcatgcattagaacatgctcgtgaattaaatgtttcaaatgctttattgcatacagattctaaattgatagaagatagcgtgaatcaaggttatgtaaaaaatgcgcgtttcaaaccattttttgaaaatatggagattttagaagcaagttttgatttgctatttgtaaaatgggttccaagagataaaaataaagaagcaaatcaattagcacaacaagctctatacaaattaattaagaataaacaataataatgtaaaaaagaagataaaagaatttatgttgaattcttttatcttctttttttatctgttttacattaaaatttttgaagcaagatatttaccagagacataaagttcgtgttcattacaaattgaaagaatatgattcaatgaatgtgtatattccatttctttatataatgcagttgtatcgataggcacatccgtatagatttccgctaattgtttggataaaatcaaattttctttatcagttgcaatttttttctgttgaccaggtgtaagtgattcgatatggtctagtacgttttcaacgctaccataagattgtattaatttaatggcggttttttccccaatacctttaacaccaggatacccatctgctgaatctcccataaatgctttaatatcaataagttgaagtggatgtaatgcatactcttcattaaaacgattaagagtataatgatgataaatattaaaaccttttctgattaaccagacttctacttgttcattgatacattgtaaaatatctctatctccagttacaatatgtacttcattatcttttgaatatattttagcgagtgttcctatgacatcgtctgcctcataatttgcaacaccgatattcacaaaaccaaattgttctgaaatgtcttttacgtaatcgaattgaggtatcaattcttctggtggcgcaggtctattttgtttataagaagtatacatagcatttctaaaggtcgcttgccccatatcccaacatatcgcaacatggcttggtttaatatccttaattgccgtaaagatatgtctaacaaaaccttgaatcccattggttggcatacctttagaattatacataaattgattgtgtagacttgtagcataaaaatgtctaaataagagtgccattccatctacaagtaagacacgttgagtcatattaatccttctttctaatttaaaagtggttccaattgttgatttactgtttctaattgttcaatgagtgaattatcgatacgtttagataataagtcattgatttgctctaaaacattattatttaactgattaagttcgatgttcgcgtcgtgagttaagttagatacataataatttaattgttgttttaatacgtttagtgatggttgtagcagttctagtgtatttgtacaaatcatttcttgcagttctctttgcgcatttgcatttaaaattttacgtttagacaactgtttaggtaaaactgaaagcatctcttctaaactaatacgtaatagtgcatcatcagtaaacggcgctgttattttaaaatgaggttggataagtacatgaactgagtttaatttttgaattgttggtgctatttgttgatctaattgagaagtaaagtatgtttttattctttcgactaataaagtttgttctaaatataatcgttgatgaacttgatctaagtacattttcgtagcacgtttcttttcatcattaaaatcattattttgtgtcatttgactattatatacttttttaacctcatctaataattgaagctgtaatcgtttatttaaatgatagatttgttcttcaacctcatttttagtatgctgctcacttgtatgaataatttggttagttaatggtgttttatttttataagtttcaagttgttgttgttgttctaacatacgtgtttgatttgttttaaattcatagatgatttgattaaagttatcgcgcatttgctcgatttgatgaatcatttgcttctctaaaatcgttttcgattcagtttcgacaaaatgattaatactttcttttaatttaagaatgccttcatctttagtctccaatgcacgtttacttgatacaccgaataattcagatggcagattcacttgagatagagcatcttttacatactgctccactgctattaaatcttcattagtttcagctaaatctatcgcattaataatcattttaaatgtctgtgcttcatttaattggttaatatctttcatatgttcaataaatgctttgtcattatcagtaaatgagtgattaaaatagctcacatataaaattaggtctgaagaagttaagatgcgttcagtttcatttgtatgtcgttgattattagaatgtaaccctaatgaatcaacgataattttgtcttttaaccaatccagtggaagttgtatatgaacggttttaacaaatgtagcgtattcgtcttcagcactccattgcttaatttcattttgtgaaatagtatgtgttataccttctgttagcatatcttggtacattgaaaagtgcttctctactgatgttataaaagccaattgatttttttctaattgttgttttaaagactcaatattactattcataaatttttctaacgagttaaaagaaacgttttgatattcaagtaattggtttaattcatttaacaattgcgtatttgttttcaaagtaatttgactatcatgaccatatgagatttcagtcgtagctgctgttgttggattaggtgagcttacaagataatgatctccaagtaaagcattaatcaagctactttttcctgcactaaatgtaccaaagacgcctatttttacaattttattatctatgcgttgcaatgttgctttgatgtcttgcttagttttattgaataaaggaacaggctcaatgatagccagagctttctgaatatcaaagtgatgagttgtcgtatccttagttgatgtaatatcttcgtctaaatcatttgttgaagatatggttgattgattaagtttataatgtgtttctgttcgatcaattaatttatcgagtgagtcatttatatgaatataataatgtttataattttcagttgttaatgactgttttaaattcttgaactcaagatactgttcatataaatgtgcatcattatcttctatgttagataattccgttgcttcagtatgttcaataatgtctttaaataatgaatctgattgtttttcgatagcacgtgcaattgcttttaaaacgtcatcactaaatgtgagcacataggtattattaatgcttgtttgtacttgatataaattagaaattaaagtaggttcaatttcataatgttgatttaaaattcgttgatttacttcagaatgatgaataaagcgagttacaaaagataaatcttcacgcattggttgacgaatgtgtcgattcactttttcttgtaaacggtctacaacaatttgtaaacgttttgctctctcttcttccgttttcttttttttatttagaagaccgcccactttgaagtctaaagccatgctttcaagataataacgaatatcttctcgcatatcatgagtcataatataagcattatctaatatatttttccgtttttcttttaagtacgttaataattgagaagaatgatttaataattgtgcttcttcacttatagcttgattctgttgaaattgtttataggattcttcaaattcggattcattgatatttaaagcgtcaagtatattttgcatatgctcttgaatatgtgaaagctgagtacgatgtataaattcaatgatacgtgttacaaaatcttcaataggttcacgtagtttatcttgttctactaaaaactctgagaataaatgaagttgattgtttggatgatcaaatttactaacataaaatagttgagcgactttaatatcccaatcttgtatagattgttctactttttgtttaaatgtatcaaaagaaatttcattctcattatgcttatcaatttgattgataacaaaaataataggtatgcctacttgattcatgcgtttcataaattggaaattgagcgcagactgaacatgattataatcaactatatacacaatcatattgcttgtatataaaaattgttcagtagtggattggtgtgtagaaacatttgaatctactcctggagtgtcttgtaatgtaaaaccaagattaaacttatttgaaggaaactttatttcaatagattccacatcaatatttaatcggttcattatttttacatcatcatacgtttttaacttagcatatttttgatattctaaattagcaataatttcttcttcttttgaaacagaaactatagccgtattactcgttgttggtacaggtgagctaggcaatatatcttgttctaataataaattgattaatgttgacttaccagctgaaaaatgtccaacaaatgataaagtatattgatttaaatatacttttttaatcacttgatttattgtatgtactaatgcttcgttattcgatttttctatttctttttttaatttgtataatacatctaattgttcattattttgcataatgctatcccctttatttcactcactctaaaatataaaaaaattaaggttataaaactaaaaagaattataacctcacttttagggtgataaaactaaaatatctttagctatgtttattaaattttatcataagaaataataaaaacctatatagaatgaattagttaaaccaagctggtttatcgccatcagtatttggtttatttactccaatattttgtctagaataaagttcaggttgtttcgctatacgcactgctaaattggctacacttcttctagaaacttctgttcctttaaaggtatcacctttttgagtaatttcataatctgattcatttttaaatgttaaccaagcaggacgaataattgtataatctaagtcagacgcttcaattaaatcagctgctttacgatatttagttaatttttcaccaaattgttctttgttaaatgtattgaatttatctggtaattcgtcataaataccaggagctgccacaaatattaaacgtttaacattctttttgttcatggcatctataatggcttgtgcttctctatctagtgatcctgataaacttgcaaaaacaatatctacttgatctaatgctttttctaaatcttcaacatttttagcatcaccttcaaagacagtgatacgattagatgcgtaatcaggaatacggtgggcatttcttaaaaataaatcaacgttaaaactagaattctctaagaaaattttagttgcttcaattgatacttttccgttagcccctacaattaaaactgtttgcataacttattctccttactatactgtttaaatgtgctatgtttttaacacgcttactaataactttacaatagtcactattatagtgctaataaatacataaattttaaataaatattatccaatttattaagaaaaatttacaaaattaattattttcaaataaatcttcaagtcaaatttatttatcaatattaggcttttttccccagtattgataatacgtacattcgatataaccgttaaaaagttttcgacgtttagttgctttacgatctactaaatactcaaattctttattacttgtaaggatatatgttgataaataaggatgttgtttcattagtttacctacatatcgatacatttcttcaacttcagctctacctccaatacgctcgccgtatggcgggttaccaactaacgctacaggtccttcttggtcgatagttaatgtattaacatccttaacactaaattgaataatatcacctaggcctacttcttcagcattacgtttagcaatttcaaccatttctggatcgatatcagacgcatacacttgaatgtctttatcatagtcagcttgttgatcagcttcgtcacgcatgacgtcataaatattaggaggcataatattccattcctctgatacaaattctctattaaaacctggcgcaatattttgagcaattaaacatgcttcaatagcaatggttccagaaccacaaaatggatcaataaagggtgtatcacccttccaatttgctaaacgtactaagctagctgctaatgtttctttaataggtgcttcaccttgtgcaatacgataccctctacgatttagtcctgaacctgacgtatcaatggtaagtaggacattatctttaagaatagctacttcaacaggatatttcgcaccactttcgtttaaccatcctttttcattataagcttttttaagacgttcaacgatagcttttttagtaatggcttgacagtcaggaacgctatgaagtgtagattttacactacgaccttggacaggaaattgtccttctttatcgataattgtttcccaaggtaatgcttttgtcttttcaaaaagttcatcgaatgttttagcattgaagcgtcctactactatttttaatcggtcagctgtacgtagccataaattacattttacaatggcattagcatcaccttcaaagaaaatgcgtccattttcaacttgagtattataaccaagttcttgtatttctttagcaactacggcttcaagacccattggacacacggctaataattgatacattatttcatctcctttgtctcatatcatattagtatattaacaaatattaaaataattatgtatacaaaataaaaaaagctctccataaaaagggagagctaaactagtctgtgatatctctataagccatgttctgtaccattgtactcataacgtacactagttgtactggtactttggtggtaatcatctgtctacagatctttactatgcgagtaaagatgtctcgtttatacgttgaattccgctaaacaagtgctcctaccaaatttggattgctcactcgaggggtttaccgcgttccaccttttatatttctataaaagctacgtcactgtggcactttcaaactattttaaccatatcaatgaatgacttaggttatttcattgccgtcaaattaatgccttgacttattgtttcatcaagcacgaacactacaatcatctcagattgtgtgagcatggactttcctctatatttctatagcgattacccaaaatatcacttttgtgagtataacataattttaaaatatttaatagaattttaaatagataaataattagctatcaaaatcaaacataatagcaatcaaacatgcttcgtaacaagcttatatctttaagatatcaatgtattatttgccaaaaacagctttttcaagattagaaattctttttaaaatgtctacgttgttattcgctgatttcgaattgcttgaagcaaatgacttattatcagaaggacgtgaagttgcaactctgattctcaattcttcaacttcttttttaagtttattattttcttcagatagtctgactacttcattattcatatcagccattttctgataatcagtaatgatatcatctaaaaaagcatcaacttcttcacgacgataaccgcgagccatcgttttttcaaagtctttttcatagatatcttttgctgaaagctttaaagaaacatctgccattaatttccacctcattcaaaactttggtcttgttgccattgtaaatcgttaataaagtcagtaagttcatcaaatgtcacaatatcacaattataagtcgttttttccataaaatcaactaacatcctcttaaaatattttggacttccttcttgttcatcatcataaattaataacgtcatatctgtatgatctaatataaactggtctgtttgtttaaattgaaaaggtccttgatattcagaatgaaatacactttctagaaattgtgcattactagcaatagattcatactttgctatattgtgttcattccatttggaggtatgaccataaaatggtgtgataatacctaattttaactcaggatatgtgtcttgtaattttaatactacttcagctgcccataattcaataccaatttgtccttgaatgagtacccattctagcccttcgtcaatatactgtaataatttatgttctataaattgtttaagataatccacttctttcatatcatctttaaatatatttaactcaaatgatttatatccagtcacatatactgttttcaatgtattgattcctctttatcttttatatgtttaagcaaattggtaagatcataattagcagatttcaatttttcattaaataacttcttacttgttttattgtagtgacactctacagataattccttaatatgtttaactaaaatttttaatttttccttattcatataaggaaattgaattagttcatcatgataatgagataattcttcagttaaaccatcaattttttttacataaggaacaacatctcgatgaaattgcttctctgactgtgtcaattttatttcattatagcttgacgccatgtactgtagttctttaagtatttcattaattaatgtgtacataacgaggcctcctatattcttacaatttattacaattattttatagtattgtttagatataaattttacattattacaaatttttaaacatattgttttcactgttaaagcacgttaaaatagaatagataattaatgaatatatttaattatgtgtagtataatataaatattatgctcatttcattattatcgtattatagtttaatattattctctgagaaattgaaagtgtaatattaaatttgtgtggtgagtatgataaattatccaaatggaaaaccattcaaactaaatcctactaaggttggaagtaatcaaagtgatgcttctagtaacattaaatatggtggacgaggtatgactctcgaaaaagatattgaacaatctaacaattactattttaagcatggtgtggctgttatacataagaaacctactcctattcaaattgtaaatgttcattatcctaaaagaagtaaagctgtaattaatgaagcatactttcgaacaccttctacaactgattataatggcgtttatcgaggctattacattgattttgaagcgaaagaaacgaaaaataaaacgtctttccctttaaataatatccatgatcatcaagtagaacatatgaaaagttgttttctacaaaagggactcgtctttttactgattagatttaaaatgcttgatgaggtatatctattacctttttcgaagtttgaacctttctgggaaagatataaaaaggaaataaaaaaatcaataacagttgaagaaatcaaaaaaaatagttactatattccttatcagtatcaacctagattgaactatctcaaggctgttgataagttgatattagatgaaagtgaggaccgcgtatgacggaaaataaaggatcttcccaaccaaataaaggtaaaaatgggaaatccaaatcaaaaaagaataagaatgtaaaaagaacgattattaagattataggctttttattcattgcctttatcgtgttacttctactcggtatacttctatttgcatattatgcttggaaagctccagcatttaatgagtctaaattacaagatccaaagcctgctgaaatttatgataagaacggtgacttggttaagaaattagacaatggtgcacgtagagaacatgttgatttgaaagatgttcctaaaaatatgaaaaatgccgtgttagcaactgaggataatcgcttctatgaacatggtgctttagactataaacgtttatttggtgctattggtaagaacgtaactggtggttttggttctcaaggggcatctactttaacacaacaagtggttaagcgttcattcctttcagaaaagaaatctattggacgtaaagcgcaagaagcttatctatcttaccgtttagagcaagagtacagtaaagatgatattttccaaatgtacttaaataaaatttattactcagacggtgtatatggcgttagggctgcagctaaatattactttaataagaatttaaatgaacttaatttagctgaagaagcctatctagctggtttaccacaagttcctaacctttataacatttatgataacccaaaagaagctgaaaaccgtaaagaaactgttttatacttaatgcactaccatcatagaatctctgataaacagtggaaagaagctaaagctacttcattagaagataatttagtaaaacgtacaacaaaagaacgtcaaatatctaataatgattctgatactgagtatgattcttacgttaattttgttaaagctgaattaataggcaataaacactttaaaaataaaaactatagtgatttaatgcaaagtggtattaagatttatacaaatatggataaggacgtgcaaaaaacgcttcaagatcgcattgataatggtaattactataaaaatgatgatcaacaagtgggttcaaccattcttgatagtaaaacaggaggcattgtagccatttctggtggacgaaattataaagatgtcgttgatcgtaacgctgctacagatacacacttgactggttcatcacttaaaccattcttatcatatggtccagcaattgaaaatatgcaatgggctacaaaccatgcaattcaagatgaatcaagttattccattgatggcggtacattccgtaactatgatagtcaaggtcatggtacagtatctgcatatgatgcattaagacaaagttttaatattcctgccttaaaagcttggcaacaagtatcatcaagtgcaggtaaagatgctccaaaagagtttgcgtctaaagttggtttagattatgacattgatttaggaccatctgaaattttaggtggtggtgcttctgaattctcacctactcaattagcatcagcattcgcatcaatagctaatggtggtacttacaataatgctcattcaattcgcaaagttgtaacatctgatgatgaaactatcgaatttgatcatacaagtcataaagcgatggaagattatactgcttatatgcttgcagaaatgttaactggtacatttaaaccatatggttctgcttacggtcatggtgttgctggcgttaatatgggggctaaaacaggtacaagtacttatggcacagaagttaataatcaatataacttacctgacaatgcagccaaagatatctggatgaatggtttcacacctaaatatacaatgtcaatttggatgggcttcagccaaattaaacaaggcggtgaagattcattcttaggacattctgaacaagaatatgcacaatatctatataaagatgtgatgtcagatattacttcaagtaatgatggagacttcaaaaaacctgattcagttgttggttcaggtgcaagtacattatcagttaaagatcatccagataataatacaacatcaggaagtaaatatgataatatgtctactaacaattcagatagtagctcatcaagtaattctagtagtacaggaaatagttcaagcaattctaattctaccagtgataacaactcaaatactacatcaacaacgaacagtaatactacaacgaatacaggtaatacaactgataactcagtaaataattcaactacgaacaacagtgctaacaatagtaccacatcaactcaacaaaataataataatgataatacaaataacaatagtagtttatctaacatatttaaagcaaatacgatttttaattttagaaaagcgtcgtaatagctttaaaaacgagtccgggacataaagtatctagataagtgaaaaaagacaatttctattgaaataatatagaaattgtcttttttataatttttttgattattttcagctcgttgagctgttacttttcttatatttcattcatttgtctggtgacaatggcaaggaggtcacacctgttcccatgccgaacacagaagttaagctccttagcgccgatggtagttggactgacgttccgctagagtaggacgttgccaggcatatatattggagaattagctcagctgggagagcatctgccttacaagcagagggtcggcggttcgatcccgtcattctccaccattcaatttaatagccggcctagctcaattggtagagcaactgacttgtaatcagtaggttgggggttcaagtcctctggccggcaccatctaagagccattagctcagttggtagagcatctgacttttaatcagagggtcagaggttcgaatcctctatggctcacatgtatacgcgggtgtggcggaattggcagacgcactagacttaggatctagcgccttacggcgtgggggttcgactcccttcacccgcatatgcggaagtagttcagtggtagaacaccaccttgccaaggtgggggtcgcgggttcgaatcccgtcttccgctccattattttgccggggtggcggaactggcagacgcacaggacttaaaatcctgcggtgagagatcaccgtaccggttcgattccggtcctcggcattattattttgcgcccgtagctcaattggatagagcgtttgactacggatcaaaaggttatgggttcgactcctatcgggcgcgttctcttacgggaagtagctcagcttggtagagcacttggtttgggaccaaggggtcgcaggttcgaatcctgtcttcccgataggaaatttaaaatttattatgggggcttagctcagctgggagagcgcctgctttgcacgcaggaggtcagcggttcgatcccgctagtctccaccatttaaatcatttacaaactatataacggcggtgtagctcagctggctagagcgtacggttcatacccgtgaggtcgggggttcgatcccctccaccgccactaattattagttgtagaattaaaatttggacctttagctcagttggttagagctaacggctcataaccgttcggtcgcaggttcgagtcctgcaaggtccatataattttggaggaatacccaagtccggctgaagggatcggtcttgaaaaccgacaggagcttaacggctcgcgggggttcgaatccctcttcctccgtatttggtctcgtagtgtagcggttaacacgcctgcctgtcacgcaggagatcgcgggttcgattcccgtcgagaccgccatctaataatttaatagcaatttacctataaaatgtggaggaatacccaagtccggctgaagggatcggtcttgaaaaccgacagggccttaacgggccgcgggggttcgaatccctcttcctccgccatttttattatcgcgggatggagcagttcggtagctcgtcgggctcataacccgaaggtcggtggttcaaatccgcctcccgcaatttattttggtctcgtagtgtagcggttaacacgcctgcctgtcacgcaggagatcgcgggttcgattcccgtcgagaccgccatttaatcattttaatatatatggttcagtagctcagttggtagagcaatggattgaagctccatgtgtcggcagttcgactctgtcctgaaccatttcttgccggcctagctcaattggtagagcaactgacttgtaatcagtaggttgggggttcaagtcctctggccggcaccatcttaacggaggggtagcgaagtggctaaacgcggcggactgtaaatccgctccttcgggttcggcagttcgaatctgcccccctccaccatcataaatagggacatagttcaacggtagaatagaggtctccaaaacctttgatgtgggttcgattcctactgtccctgccatggcggttgtggcgaagtggttaacgcatcggattgtggttccgacactcgtgggttcgattcccatcaaccgccctttattattaatgggctatagccaagcggtaaggcaacggactttgactccgtcacgcgctggttcgaatccagctagcccagtttttttggcggcatagccaagtggtaaggcagaggtctgcaaaacctttatcaccggttcaaatccggttgccgcctccatgtgctatgcgggagtagttcaattttagaacacattccttcccggaatgagatataggtgtaagtcctatcttccgctccataatttgatacaatgcgggagtatttcaacttttagaatatgttccttcccggaacaaggtataggtgcaagtcctatcttccgctccataatttgatataatgcgggagtatttcaatttttagaatatgttccttcccggaacaagatataggtgtaagtcctatcttccgctccataattgcttccatagggaagttttttatttatatatattaagccggcgtggcggaattggcagacgcgcgggactcaaaatcccgttcctttattggagtgtcggttcgaccccgaccgccggtatgtaatggatttaaaaggattaagtagaacactctacttaatccttttttatttgatatttttttaactacttattttatattgtataaaatgagataatataatattatatagctaatatttaaaaatggaggctattatgagtagaactagaataaacttaaaatatttttttagtaatattcttaatgcagttggtgcaggagtagttattgcattacttccaaatgcacttttaggagaactactaaaattatttaaagatcaacatccaatattagagcttgtttttcaattagtgacaattattcaatcatttatggcatttattattggaatattggcagcacatcaattcaaatttagtggtgcgggtgctagtatgataggtatatcagcaatgttgggctctggagctatacaaatgaatgccaaaggtattgcattaaaaggaattggcgatattataaacgtaattttagttattattatcgcatgtgctttatatttattattacaaggaaaatttggttctttagaaatgattattttacctgtatttattccagtagtcagcggattaattggattaacgactttgccatatatacaaattatcacaaaaagtttaggacatgtgattaattcatttactgaatttaatcctttaattatgtctatcttaataagtgtgacattttcactactaatggttacgccaatttctctagttgctattgctacagctattagtttaaatgggttaggtagtggtgctgctaacatgggaattgttgctgcatgcgttacttttttctttggttctttacgtgtcaattcagttggtgtcaatttagttttgtttattggcgctgcgaagatgatgattcctgtttatttaaaacatttaatcattgcaataccattaaccattaatggtattatttccggtttgttaacatacttcattggaataaaaggaacaccattatcagctggatttggttatacaggattagttggtccaattaatgcgtttaatagaatgccgggtgattcaacatttaatattcttctattagcattaggttattttattgttccattcattagtgcttttattattcatgaattatgcaaaaagtttataccatcatataatgataatatttatagatttgaaatcactcaccaataatattattttaaaggtatttaagcatctatagtaatgtagatgctttttttattcgaattttttattgcatattaatactttattgtgtataataattaaaaagttataggaggttgctatatgaaatatatttttaaaacaatgatcatagcaatcttaattagtttgacctttataaatatagaacctatggctcacgctgatcaagatgcaaaatgggaaaaaattaaggaaagtggggaattaagagtaggattatcagctgattatgcaccatttgaatttgaaaagactgtaaaaggtaagagtgaatacgcaggtatagatatcgatttagctaaaaaaattgctaaagataatcacttaaaattaaaaattgtgaatatgcaatttgatagtttactcggtgcattaaaaacgggaaaaattgatgttattatttctggtatgacttcaacaccagaaagaaagaaagaagttgatttctcagattcttatactaaaacgggcaatgtaatgcttattagaaaaagcgataaaaataaatttcatacattaaaagacttttctaataaaaaagttgcagcacaaaaagggactgaacaagaaaaaattgcgcaacaagaaatagagaatgcagacattagttcattaaatcgtctaccagatgctattcttgcagttaaaagtaataaggtagaagggttggtaatagaaaaacctgttgctgaagcatatgtaaaacaaaataacagcttaatgatagctaatgtgaattttaatgaagaaaagaaagataatgtcatagctgtgccaaaaaattcacctattcttttagcgaatgtcaataaatctattaaggaagtcaatgaccaacatttaattagcaaatacatggacaaagcttctaaagatatgcaagacgatagtagcttttttgataagtatggtgcattttttatcaaaggacttaaaaatacaattttaatatcaatgattggtgtagtattaggagcagtattaggagctttaattgctttagctaaattgagtaagtttaaattgctttcatggattgcctctatttacatagaatttttaagaggaacaccgatgttagttcaagtatttttagttttctttggaacgacagctgttctaggtttagacgtttcagcattagtatgtggtactatcgcactagttattaattcttctgcttatattgcagaaatagttagagctggaattaatgctgttgataaagggcaaacagaggcagcgcaatgtttaggattaaattattctaaaacaatgagatatatcattttaccccaagcaattaaaaatattttaccagcgttaggtaatgaatttgtaacactaattaaagaatcatctattgtttctactataggagtaggagaaattatgtttaacgctcaggttgtacaaggtatttcatttgatccttttacaccgttaattatcgctgcgataatgtactttgttttaacatttacattatctagaggtatgagtttaatcgaagggagaatgaaagccagtgattaaagttcaaaatttaaataagtcatttaataaaaatgaagtactcaaagatataaatttagaaattaataaaggagaagttgtagcaattataggaccatcaggaagtggtaaaagtacattattaagatgtatgaatttattagaaacaccatcaaatggaaaagtgatttttgaaggaaaagaattaacacataaaaatataaatttaagtgaattacgtcaaaaaatgggaatggtatttcaaaatttcaatttatttcctcacaaaacagtattagaaaatgtcattttagcacctaagttgttaaaaaaagttgatttaaaaaaactagaaattgaaggtaaagcacttctaaaaaaagtaggacttgaagagaaagctaacgcatatccttctcaactctctggcggacaaaaacaaagggtagcaatagcaagagctttagctatgcatcctgatgtcatattatttgatgagccaacatcagcacttgatcctgaagttgtttatgaagtacttaaagttatgaaagatttagctaaagagggtatgacaatggtggttgtaactcatgaaatgggttttgctaaagatgttggtgataaagtaatatttatggcagatggatatgtcgttgaaagtgaaacacctgatcaattatttaatcatcccaaacatgaaagaactaaaaactttttggcgaaagtattatagcatgttgtatatgaagactgataaaacatttataaggttttatatctaaaaagtaataaaagttaattaagaaaagaagatagaatttattctgaattataaatatagactttctttataacattctcaaagttaaagaatctgagatactttaaagtatatctcagattcttttttatttataaaaatatttaatatcataaaaaattaagattatgttaaaatgttctatggacttttttataggaggcaagagtgttgatgaaccatcaacttaaacaggaaatcattgactatgcgtattccattggtatagatagtattggttttactactgctgatcctttcgatgaactgaaacaaaagttagtagattatcatgaaaaaggttatgcatcaggttttgaagaatcagatattgcgttacgaacagaacctaaattatctttacccacagcgcgttctattatagctattgctgttggttatccaaataagctaaagggagcgccaaaaagtgtaaaaggcgatagaagaggaatgtttgcgagagcctcttggggtcaagattatcattcaattatgaaaaaaagattagacaaattaagtgaatttattcaatctaaggttcctgatgtcgaaataaaaagcatggttgacactggagtactttcagatcgcgctgtagctgaaagagcaggattaggattcgttggtagaaatggatttgttattaatccaaaactaggaacttggacatatttaggagaaatgttagttagtattccttttgaaccggatgatcctatattagacagttgtggagattgtacaatttgtgtagatagatgtccaacgggtgctttagtagggaatggtcaactgaattctcaaaaatgtatcagctttttaactcaaactaaaggatatttaaaagatgagtatcgatataaaattggtaatcgtctttatggttgtgatacttgtcaacaagtttgtccgaaaaatagaggcattaatacaactcacgaagatattattttagaaccagaaatattaaagccacgtttagttccattgttacaaatgagtaataaagaatttaaaaatacttatggtcatttggcaggagcatggagaggtaagaaacctatacagcggaatgcaattattgcacttgcacattttggtgaagaaacggctattcctgaattaaaggaagtggcattgaatgatccaagacccatgataagaggaacagcatattgggctattggccaaatactaggcgatgatgcaagaacatttatttatgagcattttgataatgagattgaagaagttcaagttgaaatgagaaaaggactagaaatgaggaaataaaaatgacaaaccatattgtgttattccaaccagaaatacctgcaaacactgggaatattgcacgtacatgcgcaggtaccaatacacacttgcatttaattaaaccattaggctttagtacagatgacaagatgctaaaacgagctggattagattattgggaacatgttaatatcacttatcatgaaaacattgaatcatttttcgaagtgacaaatggtaaatattatttacttactaaatttggtaaacaaacttatagtgattttgatttttcaaatactgaagtagaaaattattttatctttggtagagaaactacaggtttaccagattgggtaaaagagaagtatgcagatactgctttaagaattcctatgagtgatcatattcgttctttaaatttatctaatactgctgctttattgatttatgaagcattacgacaacaaaacttcccaggattaaagtagaatttaaaattaattactataatagaataaaaaatgttatatttattaatgaattattataaaaattttaaaatagtttgatatccccttaaatagggtaatttagtaaataaatgaattattttagttgaactttacatttagaggagtgtaattattatggcaatgaattttaaagtattcgaagataaacaacatgcagcagactatgctggagatattattagaaaacaatttaacaataacccaactaccattgctggtttccatttaaacaaggattctgcacctgtattagatgaattaaaaaaatcagttgatcgtaacgctgtagattttagtcaaattaatattcttgactatgacgataatcattcgttctatgaagctttaggtgtaccttctgagcaagtatattctattagtcttgatgatgatgctgaatcattaatcaatgatagaattaaaacaaaagaaaataaaggaaaacttactttacaagttgtttcaattgataactctggacatttagatgttaatattcgtcaaggtttgatgaaggcacgcgaaattatcttagttgtaactggtgctgaaaaaagtgaagttatcaaacgattatatgaagaaaatggtaaatcaaactttttacctgctgatttaaaagtacatcgtatggtaacagttgttttagacagagctgctgctgatggattaccagaagacgttaaagaatacttcacagcgagatttgcataatatttaattttattgtgaggttatttttatgagtaaagatagtaaacgtaattatcatgaagacgaaaatgcaatggttcaaaatatggatgatttagaagcattaggaaaagaaatggaacagatttctgaagaaaatgatgaagataaatataatcaaacacatgattcagaagcgcgttcagatttaaattaatatattttagcattttaattaattgtttcgatagattaattaaaatgctttttttatgaaatacaacttatgatacaatatattttaatgaaaatgaaggagataaaaatatgttacataagtattggctacctttaacaattattacaatcattgttagtttaatttctattaaaggttttcccattgctctaggagcactctatctaccagtgttatttaaagtgattcaattacaattgaatttatcaaaggatttaatagataatgcaactgctcatccattcattaagagtaatcaaaaaggaattatgattagtgttatatgtatattaattgtaacaggaatcttggcatatacacttaatgatttttatcgaagtttaggtggggttttaggtatgttagtaaagataagtcctgttacgcttgtcataagcgctattttgtatataataagtgctatttcagttgtaaaagcagtaaaatataaatatgaataagatttattcttaaacacgtgaagtaatacaacttcatgtgttttattttttataaatgaaaccgctttatattcgaattgctacattaattttattaatgatatactattactaaatcataaataagggggattattgaatgtctgtaagaattgaacatgatacgtttggtgaaattgaagtaccatctgataaatattggggcgcacaaactgaaagaagtaagcgtaactttccagtaggtaaagaacatatgcctattgaggtgatttatggttttgctcagttaaaaagaggtgccgcgcttgctaatcatgaattaggaaaattaagtgatactaagaaagatgctatcatttatgcttgtgatttaattttaaaaggagaacttgatggtcattttcctttagttgtatggcaaacgggaagcggtactcaaagtaatatgaatgtgaatgaagtcgtaagttatgtagctaatgagtacttaaaagaacataatagcgatgaatcgattcatcccaatgatgatgttaataaatctcaaagttcgaatgatacattccctacagctatgcatgttgctttataccatgaaattgaaacgaaattagaacctgctttaaaacatttacgagacacatttaaagaaaaagaaaaccaatatcaatcaattattaaaattggtagaactcacttacaagatgctactccaattcgattaggacaagaaattagtggatggcgttatatgctagataaatgtgaacaattattagctgaatctaaacaacatattttaaatttagctattggtggaacagcagttggaacaggaattaatgcacatccagaatttggagataaagtagctaaatatatctcagaacatacaggctatgcatttgtttcatctgaaaataaatttcatgctttaacctcacatgatgaagtggtgcaacttcatggaacactaaaagcattggcagcagacttaatgaaaatagcaaatgatataagatggcttgcttcaggacctagagccggacttgcggaaatctcaattccagaaaatgaaccaggttcatcaattatgccaggtaaagttaatccaacacaatgtgaaatgctaacaatggttgcagtacaagtgataggaaatgatacgacagtaggtatagcgagttctcaaggtaattttgaacttaatgtatttaaacctgtgattcttcataatacattgcaatctatttacttattagctgatggaatggaaacatttaacaaaaattgtgctataggtattgaaccaattgaagaaaatatcaatcattatttaaatcaatcattaatgcttgtaactgcactaaatcctcatattggatatgaaaaagcagctcaaatagctaaaaaagctcataatgaaggtttaacacttaaagaatcagcaattaattctggctacgttacagaagaacaattcgaggaatggattaaaccagaagatatggtcgatcctcattaaaataacattatcaattgaaatgctccttttaaagataatgctttgatctgcgttatctaaaaggagcattttaaaaatttattcatcatctaaacttacagaaatcaattcttgagtaagtgggtgagtgaattcaatcttataactattcaattctaattgacgtaaggtagcatctccatataatggatcacctatgacaggatgaccaatttctgctaaatgtacacgtatttgatgggtacgtcctgtatctaattttatttccaattgacaaatgccttctttaatcatttttgatgttaagatatgagtgatagctcgttgtccggtattagaaatacgacgcttattgggatgaaatttatctttaccgattggcatatcaattgtttgtggttttagaggtagtaatgcttttacattggcacgataaatacgtgtaatttgattctcttcaagcattctatctagtatttttttcattaaaggatttttagcaacaattaataatcccacagtttcttggtctagacgatgaatcggttcaacgtagtcgctatccatagtatagataacatggttcattagtgtattgctttcttttaaatcatttggatgagttttaacccctttaggtttcattacaatagctaaatcgttatcttcatatgcaatctgtgcgtaacgataacttggtaaataattacttttttcttcagggataggaatataaacaacatcatttgtgacaactttatctgtcaatttactaggttgttgattaatcgtgatatctttagacatatttaattggtgtaagtctttttttggtagttttaacttttgaaaaatttcacgtaacgtataattattgaaagtttcaggtacattgaatttcataatatcctcctattatattctgtttaatcatatcataatttacaatgataattataattgttttcatcagtctatttttaaattttaaaaataaacgatataataataaacgcaaaataacaaaatggggcgaaaatatggaaaaaccgacacgtttagcattattaaaagaaattgcagaatatcttaatgaagaaactgaattatataatatgatgaataaagtattagattatttaatcaatggtagcagttttacaacaggttggatttttttaatcaataaaaaaggtgaacaagaacttgtagctagcactgatttacctcattcattaaaaaataataattgtaagtatttaaataatggtacgtgttggtgtgtcaatgcttatcatcataaaaatttaacaaaagcatctaatattataaattgttcaagaatcaatttagctaatcaagaaagtgaaaaagatgattatcttattacgcatcatgcgacagtaccacttagatcaggagatgaacagtatggattattaaatgtcgcgacacctcatactgtagtatatagtcaagacgatttagagttactagaatcagtagctttacaaataggttctgcaattaaacgtatatacttaacagaccaagaaaaagaagcagcacgaataagtgaacgaaatcgactagcgcgtgatttacatgattcagttaaccaaatgcttttttcattaaaactaacagctcatgctgcacatgatatcacagaggataaaacagctaaaaaagcatttaagatgattgaagatacaagtcaaaacgcagtaaatgaaatgcgtgcgttaatttggcaacttaagccaattggtttagaacatgggttagtgaatgcgattcaacattatgcgaatatgttagatttaaaattaaacatcgaagtaagaggattgattaaattatccaatttagttgaagaaaatgtgtaccgaatgcttcaagaagctttaaataatacgaagaaacatgcacaaacgaatcaagtatctattaacatgcaacaaaatgaacatcaattatatattaaaatttatgatgatggaaaaggatttaatgtgagtgatgatttaaatcaaacgacgcatggtctaaaaaatatcaagcaacgtattcatagtttagacggagaatttaacatacaatcagataaacaaatggggacaactatttatcttaatattccaatttaaagtaggtgataaatttggcaagtatcgttttaatcgatgatcatcacattgttagacaaggactagaatttctaatttcaacagttgagggtttagatatacaagcaagtttttctgatggtgacgcatttattaaatatttaaatgagaataatatgcctgatttagtattattagatttagttatgcctaaaatgaatggtatcgaagtgacgcattatataaaaaaatattacccatacataaaagtgttagtgcttacaagttatgtggatgatgaatatgttatgtctgccattaatgaaggtgctgatggttatgaaattaaagatgttgaaccacaaaagctgattgctactattactaaagtattaaataatgagaaaataatacatccaaaagctaaaaatgtaattgatgcaatgcatgaaaaaccacactttaataataaattatctaaaagagagatggaagtattaaaagagatggtgaaaggtaagacaaataaagacattgcaaaaagtttatttgtatctgagaaaacagttaaaacacatgtcagtcatatatttaataaattacaagtttcagatcgaacacaagctgctatatatgctattgaaaataaattaatataaattgaatagatctattaaaaataaaaacggtaattttaaaatatgataatgatagacaaatgacttgttttattagtttaattattttgataattttgccatttataaaattatacgtaaaaacaaaaatttctcttttcattttattgaaaatatattaagatgtaatttgtgtttcaagaaatgtgtattattgcaatttcttgcgtccggataaaataactcctattagaaaggtagagaagagtaatggatagacagagttttacagatttaattcaaacaaaatttaaaatggtgcgtattgaagcaggatacacacaagatactatggcacaaacaataggtctttctaaaaaaacacttgttcaaatcgaaaaagaacgtgtattaccaaattggacaacttgtgtatcaatttgtgctttatttagagattcagatgttttaaataacacatttggttgcgatccattagaaattgtacaaacaatttcaagaaaccattgtgcatatcctaatcattctacaacaagtgatatttattggaatacaatggaaacgcgtaatggatttattttacaaagtaataaagtaagtaatatctacagagtgcttaatcctgaaaaacaacctatttttggaacatctaaattaagagaagcagaaacttactttaatagaaatgctaaagaagaattaatgcacgtttaattttaatataaataagatatagtgatagaagagttgaccttcaactgaatcactattttcaattaataatgaattcactgtaattttgcgatgaattcattatttttttatttcaaaaatttgtaaatataaatgtacgttgaactattaagttatgcagtttacatttgtcatggtataattttgctattgcttatataaaaattaaggagttatttaaatgcaagcagtattagtagtcatctttatgatagtaataggagcaatcattggtggtgtcacgaatgttatagctattagaatgttgtttcatccctataaagctcattatatatttaatatgcgaattccatttacacctggtttaatacctaaaagaagagatgaaatagctacaaagatagggcaagtgattgaagaacatctcattacagaaactttgattcacaacaaactaaatgaaacgaaaactaaagaaacaattaatgaattagttaaggagcaaatagcgaaattaaaaagtgatcaagctacaattcgttactttgctgagaagtttgatgttaaaatagattacttagtcaatgagaaattagaagatacaatttcacaaaagctattagctttttataatgaacatcgaaatgaagaagtgattaagttactaccaaaagaaactaagcgaatgattgataagaaagtcgagccattaggagatttattatgcgaaagagctcgtgtttatctgtcatctgataaaggcgctcgtgatatttatgacatgctcgatacattttttaatgaaaaaggtaaaatcgttggattactacaaatgtttatgacaaaagaaagtattgcagatagaatccaacatgaattgattcgtttaaccaatcatcctaaagcaaaacgtattgtaaaccaagtgattgataatgaatatgagacgctgaaacgacaatcacttaagaaaatcattgatgaggctcaattttcaaaactatcagactcagttacattacttattacttcatatttaaatttaaatgaaaaaatagataaaccacttaatcaactatcaccaagattaatgcaatatttagagacaacgttatcagataaagttacacaacttattattagtcaagcatccaaacatctctcaacgataatgcaaaaaattaatctacgtaaactagtagaagatcaaatcaatacatttgatttagattacattgaaaagttgattattgaaattgctaataaagaattaaaattaattaccttattaggatttattttaggtggtatgattggtcttttccaaggtttaatcgcaatttttgtataactaatcataatatgttatggtattaaagagttgtcaaaacatcattattacacgaaggagtgcaatttaaaatggcagtaaatttatatgattatgcaaatcaactagaacaagcattaagagatagtgatgaatacaaagctattaaagatgcttttgctaaagttaaagaaaatgaagaatctaaaaaattattcgatgagttccgtgaaactcaaatgaatttccaacaaaaacaaatgcaaggtcaagaaattcctgaagaagaattagctaaagctcaagaacaagctcaagctattgaaaaagatgaaaatatttcacaattaatgcaagcagaacaaaaaatgagtcaagttttccaagaaattaatcaaattattgtaaaacctttagacgaaatttacgttgactaattaataatttaagtaatggacactacgcgattttttcataaaatcgcgtagtttttttatgtcaaagttcatcgacccatattcataagatatggtaaaatatagtaatacataaagataccttatcaaacaattaaggagcttaaattaatggttaaatttattcactgtgcagatttgcatcttgatagcccttttaaatctaaacaacaattatcgacaagtattttcgaagatgtacaaaaaagtgcctatgagagctttaaaaaaattgtagatgtagcattaaaagaagatgttgattttatgttaattgtaggagatttatttgatagtgaaaatcgcacattacgtgctgaaatttttttaaaagagcaatttaaacgtctagaaaaagaacaaatatttgtatacatatgtcatgggaatcatgatcctttaacaactagaattacagataattggcctaataatgtatcagtattttcaaatcgtgttgaaacctatcaagcgattaccaaagctggagaacaaatttatattcatggttttagttatcaaaacaatacaagttatgaaaataaaattgatgaatatccatctagtcaaggaagtaatggtatacatataggaatgcttcatggaacttatagtaaatctaacataaaacagcgttatactgaatttatgttagaagatcttaatcataaactgtatcattattgggcactcggtcacattcatcaacgtcaagaactaagtgatatgccgcctattcattattcaggtaacattcaaggtcgtcactttggtgaattaggaactaaaggttgtttgcttgtagaaggggatcatctacatcttgaaacaacttttatcccaactcagtttatacgttttgaagaagctacaattaagactgataaaatttcaaaacaaggtatctatgaggaaattcaaaagtttaagaaacaagttcgtgaacaaggtaaagcattttatagattgacgattaatatagacaatgacaaaattttatcaacacaagatattcttcaaataagagaaatgattagtgaatatgaagaaaatgaacatgattttattgtcattgaagatatgattcttaattatatacagaatgaagaaacacctcttataaatgaattttctaatgaactcataaacgatgacaaagtgtttgaagaggcaatgacagatttatatttaaatccaagagcttcaaaatatttagaagactacaccactttcaataaggcaaaactcattcatcgagctgagaaaatattgaaagcagatatgagaggtgaagaaattgattattaaatcacttgaaatatacggttatggtcaattcgtacaacgtaagattgaattaaatcagacttttaccgaaatttatggggaaaatgaagcaggtaaatcaaccatacaatcatttattcattcaattttatttggttttcctacaaagaaagaaaaagaaccgcgtttagaacctagattgggaaatcagtatggaggcaagctaacgcttattttagatgataaatctgaaattgaagttgagcgtgtaaaaggtagtgctcaaggtgatgtaaaagtttatttagaaaatggattgataagagatgaagcatggcttaagaagaaattaaactatatttcaaaaaagacatatcaaggaatattttcatttaatgtacttggtttacaagatattcatcgaaatttagacgaacaacaattacaaagctatttattagaagctggtgctttaggatcttctgaatttacatctatggggcaaattgttaatcagaaaaaaactacgctttataaaaaagctggaaagaacccaattctaaatcaacaaattgaagaactaaaacaattagaagcacaaataagagatgaagaaaccaaattagacgaatatcaacgtcttatagatgaaaaagataaatcagaacgccatctttctcatttaaaagaaaatcttaagcaattatcaaaaatgcatgaaaataagcaaaagcagttaggacttcatgctcatgcgcaagaatggaaatcgcttgagcatcatttaaatatcgaaccgttgaaattcccagagcaaggtattgaacgatatgaaactgcattaaaatataaacaatcacttgatcgagatataggattaagggatgagaagataagacaactagaaaatgaatttaatttaattcagatgcctgatgatagaactgtgagtgatatgtatcatctttatcaacaagagagtgatatcaagcaatctgaattaaaagctaaggctttaaaaaaggaaatagaaactttcgaacgttctcagcaaacattaaaagatgatatcggttggaatgaagtttatcatgaagcggatacttctgaaacaatgaaagattatataagtgaaaaaattaaaaatcataatcaccaattaaatcaaaagcaacaagttgaacgtatgattggtgagcataatattgaaaaaaaggaaattgaaaaggaaattaagttattagaaagtgaactagtttctgaaacagcacttgaaaagaaaaaagaatataatcagcaaaaaatagaattacatgaaaaagaaagtttatactcaaaattaaaagcttcctttgaatcagaaaaagaaagaaaacaaaagcaatatcaatggttgaaaatcagctttatcattttggctttgatgagtgctggtttgactatttttgcatttattacaactagtatcacttttagtattatttttgcaattctcactgtgatatttttagtaggtttattctttagtaaaaataaagatattgattatagtgaaacaattagtgaggaaattagtgatttagaacaacaacttaaagcactcgaagataaatacgatttagattttaatctagatgatcagtaccaattgcgtgaacgttggaataatgctaataatactaaatcagtactttctaataaacttaatcatcaacattcgattttatcagatattcagtcttcaattgatgcattagcacaggatatttctgaaatcaaacaagacattaaagtatctgataaaatgtcagatgaacgtttagtagatagtttgaaaacaatgaatcaacttaaagttaatgataaacaacttaataaattattattagagaacatagagttaaatcaaaatttaattaacttctatgagcatgctcaagatgttactaaagatagtttcgacgagtttaataaaatttcattatttaatgatttgaaaggttggatttctcagtatgaaagtaaaaaagaaaagaagtctcaattgcaaaatcaattaaccctattaagtaaagaattaaaacagttagaaagtcgtttggatgaaaataaaacgactataaacgagttgtttaaatatattgaagttcaaaatgaagagcagtattatcaacattacgaagcttatcaacgttatcaacaacaactatcacgattcaatgatttatctacctatttgagtaatcacgaattctcttatgaagatagttctgttttaagtgaaaaaacaactgctcaattagaagaagaagatcaaatgttagctcaacaagttgatgattataatgataaatatttggagaaacaaactgaagtgagtgaactttctgcacgtattaatcaaatggaaacagataaaacactatctcaattgcgtcatcaatattataatttaaaaaatagaatgaatgatattgctaaagattgggcgagcttaagttatcttgagacactaattaatgagcacattaaacaaattaaagataaacgactaccatatgtgatagatgaagccattaatattttcaaaacattaactgatggtaaatataatctaattacttatgaaaatgattcaattaaagttaaacatcgaaatggacaaatgtatcatccacttgaattaagtcaatcaacgaaagagttgctatatatttcattgagacttagtttaattaaggtgttgaaaccatattatccattcccaattatcattgatgatgcattcgtacattttgataaacaaagaaaatcaatgatgttaaactatttaagagaattatctcaagaacatcaagtattgtactttacttgtacaaaagatactacgattccttctcgagaaatgctgatattaaataaaaaagaggaaggcgggaaacgatgagaaacgtagaaaaattaaatcctggtgattcggtggagaattttttcttaatccacagagcgacacaaggtgtaacagcacaaggtaaagactatatgacattatatcttcaagataaaagtggagatattgaagctaaactatggactgtcacaaaagatgatatgaaaatccttaaaccagaaataattgtatgggtaaaaggggatgttattaactatcgtggccgtaaacaaatgaaagtcaatcaatttcgattagcaacagcagaagatggagtgaaaactcaagactttgtagatggtgcgccactttcacctaacgaaattcaagatgagttatcacattttatcttagaaattgaaaatgcacatttacaacgtattacacgtcatttattaaaaaaatatcaagataaattctttacttatcctgcagcaagttctcatcatcataactttgcaggaggattaagctatcatgtattaacgatgttaaaaattgcaaaatcattgtgtgatatctacccattattaaatagaagtttgttatatagcgcgattattttacacgatattggtaaagtaagagaattaagtggaccagttgcaacaacgtatacggtagaaggtaatttgcttggacatatttcaatagcaagtgatgaagttgctgaggcggcaaaagaacttggtattgatagtgaagaagtcatgttattgcgacatatgattttagcacaccatggaaaaatggagtttggttctcctaaattgccacatctaaaagaagcagaaattttattctttattgacaatattgatgcaaaaatgaatatgttcgataaagcatttaagaaaactgaaaaaggacaatttactgaaagaatctttggtatggataaccgtcaattttataatccagagaaattagattaatattaatagacgaaaaaaggtcggaacatattgttccgacctttttgatttatgaaaattatgaagataatcctgatgaagcactactactttgttgttcttttaatttttctggattaagtatagtatcttctacagattttttaatatcgctatctttataatctacgttgtattctttcaataagtctttataagcatttgtcaatagttttggatttttttgaactttttgttcaataatttttgtttttaattgagatttttgtttattaaagtcatcttctttatcagctttgataatgtgatagccgtattctgttttaacaatgtcagaaatttgaccttcttttagtttaaataaagctttatcaaatttatcgaccatttgtcctttaataacataacctaatgacccgccttttttagctgaagcagaatccattgattcttttttggcaatgtcatcaaatttatttggatttttttcaacttctttttgaattttttcagcttttgcttttgcttttttatctgataaaccttctttatcactatcagatttaactttaattaaaatgtgtgatgctttcttagtatcatcttttatttctttgtcagacactttaactttatcattaagtaattgtttttggtaagcagatagtcttttctgttctttgtaatcatcaagggtcataccctgttgttttagcatactttcaaattgatctttaccaccatattgtttttcttcttttttaatatcatcatcgatacgcttagtatctactttgtctttatatttatcagctaatattttatttaactcaatactaaatgatgtgctagcaatttgatctttaccaattttatccataacatctttaacggttacattaccagcttttgaagaaattaatgtattatctttagaatctgtagaatcagaactacatcctccaagtaataaaacacctgctgtaacagggacaatgagtttattcataattttcatagttgatagctcctttttgtatgttaacaaagttactataacataatataattattccaccaattaataaaaggtgatttacaactaaagtattagatgaaaaataatttaaaaaaagtctacgatatcattcaatatcatagactttttaatatattcaaaataaccagtagactgtattttaattttgagtgaatacgtttataattacccttctttatatattagaactttgaatggaatggcacttttgtcagtaaattaatgcctgtttggtgttcttcaacaaattgtccttcttttgaaaaaagaataatttttaaatataaaaaatccataactgataaaccaagatttaaggcaaataagaacataaaataatgtccataacttggaaaatgataagttaggaaaattaaaatgcttgtaattattaaaaatggcaaaataagattaatgcaaaaataaaacttgcggacaggcgtattcacatacgtattaaaataaggaagccattttttcttatttaacttgtgccatctaaacgcatgaatataaggtaaaaagaagaataaatgtattgttttgtgaatagggtacataagaatgataaataatattagaagtaaaaagtatttatctgataaaggcgtttttacaaaataatacataatctcataactaactaaaaacgcaataatagttgttacaatacttaaaaacgcaattcttggaacaccaaatcgcgcatggatatctatatgacgtttacataaaaacataactccacctcgaaaataggtcgtttaatatacgataggtattatctaactaacttgagttatcgtcaagacaatttttaatagctattgtaatatagagcaatgtttttatattagattgtatatttataaaaaaagccataaagaaatctattaatataaatttcttcatagccaaattgagctcaatgttagagttctatttgttattattcttatcttctgaaaatgtattactaatttcttcgccacgattttgaagattttcaatatgagattttaatttttcaatattaggattgatatcagatttaaaatctccgattaaagtcttaaattcgttagcaatgtcgctaccttgttgtacaccgtcatttttcacttgcttactataatcaataatattatagaaactacgtttaattgtttcgatttctcgttctaattctgagcgagcaccagtaggaactttttgtccagaggcattagcattatatctttgttgatcacgattcatccatgatacagcaataccagaagcaagtcccacaccgataccaaataatacacgtgtaactttcattttttattctcctcactattatgtcgattatagaataaatcatatcattttatgaagtaagtaacgattgacttaagctacttactataattattacattgacatattgatttcattttatattacccataaatgatattcaatatgcagaattattcaaattgagctttaatttgttcagcaatatcttttttctgttcatcgctaatttcattttcatgagtttcccattgataaccaaaaccatcgatatcatttttatatcgaggtaggaaatggaaatgcaaatgaaatactgactgatcagcatattcaccattattttgaataatgtttaatccatcaggttgaaatgcttttttaatggcatttgctacttttggaatagcagctccaatgtgtttcattgtttcttcatcagtttcaaaaatattaggagaagctttcttcggaattaaaagtgtgtgtcctttagtaacttgagaaatatctaaaaatgcataaacataatcgttctcataaaccttatagcttggaatttcaccagtaagaattttaccaaaaacagtttctgacataattaaatgcactcctttaacctatttttactcattattataacattgttattttaaaaattcgctaatgagttatagcaaaccttagtagttatataatgattttggtacaatataactcatggaggtgccttatgacagttaaagttgaacatttaacaggaggatatggtaaacgtcctgttattgaaaatataaattttgaattaaaaaaaggtgaaatagtaggattaattggtctcaatggcgctggaaaaagtacgaccattaagcacatgcttggattattaacgccaatggaaggaacactttctatttcagataccaatattaatgatgatatcgaaatctaccgtcgtaaactatcatatattcctgaatcaccagtcatttatgaagaattaacattagaagaacatatagccatgactgctatggcttatcaaataagtaaggaagaagcaatgaaacgtgcgcgtcctctactaaaaacatttagacttgaaaatgaacttaatgtttttcctagccatttttcaaaaggaatgaaacaaaaagtaatgattatatgcgcatttattgtcgatcctgaactttatattattgatgaaccatttcttggtttggatccattaggtatacaatccatgcttgatttgatggttgaaaagaaaaatgaagggcgtacagtactaatgagtacccatattcttgcaactgctgaaagatattgtgatcgattcattattttagataaaggaaaagtggttgcttttggaaatttagaggaactacgagaacaaacgggtcttaaagatcaaactcttgatgatatttatatccatgttacgcaaggtggtcaaacgacatgaataatgaagccatagcattatttaaacaacgttatgacgcaataaaaaaagaaaaacattattataataaatttatttttaatggtcactttactgtattcttagttattttattaggagccttcatattaggttatggtcaatggttacaacatattcctaaaaatatagattatgcattcttagcaagtattgtaattgctttaacttcaatcttttcatttcgaacatttttaaaagatgctgacaagttatttttgcttccttttgagaagaatatggaagattatataaaattaggcctaagatatagttattttaaccgtataatattacaaatagtgttattaattgtattatttccattgttttataagcttaatcaacaattagttgtatcttatatcgtgatgagtgttttagcgcttattcatcctattttaggactacgcttaaaatggcaatggtatcgtgcgagattgtctcaatggatattaaatgtcttaatattttcacttaattttataacgtattatctaattttagggaaacaattatattttgccattttattaacaataattttctttggcatggcgtaccttatacctaaatttaagagtcttacgttatttccatgggaacagttgatttcagtagaagaaagacatcatacaaattattataaatttgtaaatatgtttacagatgttaagcatttaaaagaaaatgcagcaagacgcaaatatttagattttcttttacccacacccaaaggacgtcgttttaattcgcacaatatgtatctttatttatttgtgagaagttttgtaagaggaaaagatgcattaagtattattcttcgacttgttgtcattgcacttgtacttatgatttggctgtctcatccacttgtttctattattattggtagtttatttatgtatattattttattgcaaatgtctcagttttatacgcagcaagcgtatggactatggcctcaggtttggcctgtatcagatagtgaagtgatcaaaggatatgaaaaattcttatatcgccttatgattatgataggtattattttcgcaatcatttttatcatcttttatataaaatacttcttttttgcaattgtattctttattgtaggatggttaacgattagaagtacgattaaaaaattgcaatatcaggaaactttattaagagattaaaaaaagagggaacttaagatgtattaaacacatacttaagcttcctctttttatgttaatcattaataggatataaatatctttcaaaataacttgaatgttgactgcttgagccaaaataatgtcttaatgcttctttagaaaaataatcattaaacatatcagatgatttaaaatcttcgtatgtttgacgattagcgaagccaaagtaaattttataagtagtaccttcttcaggtcgtaagaaacgatagcttttaaaaccagcaaattgactgaaatctaaattcaaattcgaaagacgtttttctagttgattgacatgatcttctgaacttggaatgaagatagctgaatagaaatgttgatgattaagctcattgatttcattaacaacttcataagtagtagggtgtttaagtatagatttatcttcggattcttcaataatgactgaagaatcattagttgaataaataaacagatgattttcaggatgatttaaacgaatttgatttaaatagtcataagttccataagttgtatatattttcataagccatacctcctttatttatgtatattatacgattaaatgataagactagctattataaataatttaaataagaaaataaattgtgaataatttatttaaatcaattcacttataattacaaatttaaaattaaagaatagatagacgtgctttgtcatttttatgacatttaatatttaagaaacgcgaaatcttttatgttgtgatattatgaataagaatgattttaatttaggaggataaaatggtgcataaaaaaaataatacaattttacaaacaattaaaggggaatcaacctcacacacacctgtgtggtttatgcgccaagctggcagatcacaaccagaatatcgcaaattaaaagaaaagtattcactttttgatattacacatcaaccagaactttgtgcatatgtaacacatctacctgttgataattacaatactgatgcagctgtgttatataaagatattatgacaccacttaaacctatcggagtagatgttgaaattcaatctggtataggtcctgtaatccacaatcccattaaatctatgaaagatgtggaaaaattaactcaaattgatcctaaaagagatgtgccttatgtgttagaaacaattaaaattctaactgaagaaaagttaaatgtacctttaattggatttacgggtgctccctttacattagcatcttatatgattgaaggtggaccttctaaaaactacacatttactaaggcaatgatgtatggcgatgaagagacttggtttgctttaatgaatcatcttgtagacgtttcaattaaatatgtaacagctcaagttgaagcaggtgcagaattgattcaaatttttgattcatgggtaggcgcacttaatgtacaggattatcgatattatataaaaccatctatggatcgtttagtccgtggaattaaagaacatcataatattcctgttatattatttggtgtaggggctagtcatctcattaatgaatggaatgatttgccaattgatgttttaggtttagactggcgtacatctattttgaaagcggatcaattaggtgtaaataaaacattacaaggtaatttagatccttcattactactagcaccatgggatgtattagaaaaaagagttaaagcaatacttgatgaaggaatgcaaagaggtaaacatatatttaacttaggtcatggcgttttcccagaagttcaaccagatacacttaaaaaagtaacacaactggttcatgactatacgcaaaaataaaattagaatcataaaaatttatttttaaaagggaaggttttaagaatgactaaaacagtaggtttattagtaatggcatatggtacgccatataaagaaagtgatattgaaccatattacacagatatacgacatggtaaaagaccaacagaagaagaacttcaagatttaaaaaatcgttatgaatttataggtggtctttctccacttgcaggcacgacagatcgtcaagctaaagcacttacagatgcacttaataaaacatatgatgatgtagaatttaaattatatttaggattgaaacatatttctccttatattgaagaagcagttgaaaaaatgcataatgatggtattacagaggctgttacagtcgtattagctccccattattcaagtttttcagtaggttcatataataaacgtgctaaagaagaagcggataaatatggtatacaactacatcatgttgaacgttattatcaacaatctaaatttattgaatactggacaaataaagtaaatgaaacattagctgaaattccagaagaagaacatgatgaaacaattttaatcgtgtctgcgcacagtttacctaaaggattaatagaacgtaataatgatccttatcctaatgaaattaaagatactatggatcgtttagaagcttctacaaatattaaacatgtagcgcaaggttggcagtcagagggtaatacaggtacgccttggttaggacctgatgtacaagatttaacaagggaattatacaatgaacatcattataaaaactttatttatacaccagttggatttgtttgtgaacatcttgaagtactttacgataatgattatgagtgtaaagttgtttgcgatgacattggtgctaattactatcgaccagaaatgcctaatacaaatccgttatttataggtgcgattgtcgacgaaattaaaacagttttttaaaaaggaagggacatgttgtgagtaaaaaagttgcaattataggtgctggcattacaggtctagccagtgcatattattttaaacattacaatgaagacatagatgtaactatttttgaagcaacttcaagacctggaggtaaaattcaaacttatcgacgcgatggttatactattgaacttggtccagaatcctacttaggtcgaaaaacgatcatgacagatttagcaaaagatataggtcttgaagatgatttaattacgaatcaaacaggacaatcctacatttttgctaagaaccaattgtatcctattccaggcggatcaattatgggaattccaacagatattaaacctttcttaaaaacacgtttaatttccccattaggaaaattaagagcaggattagatttagttattccgcctattaaaatagaaaatgatatttcggttggtgaattcttcagaaaacgtttaggaaacgaaatgctggaaaatttgattgagccccttatgggaggaatttatggaacagatattgatcaattaagtttgatgagtacatttcctaatttcaagtataaagaagaatcatatggtagtttaattaaaggaatgaaagatgaaaaacgcgaacgtacaagaaaacgtcagctttatccaggtgctcctaaaggacaattcaaacaatttagacatgggctaagttcatttattgaagcactagctaaaaatgttgaacaaaaaggtgtacacatcaaatataatacaccagtagaagatattcatattcataatgataattatgagattgttacacataatagtcgggagacgtttgatggtttacttgttacgacaccgcatcaaacgtttatgaaatggtttaatcatgattcagcatttaaatactttaatactatggattctactacagttgcaacggttgtatttgcatttgatgagaaaaatatcgaaaatacctataatggtactggatttgtcattgcaagaaccagtcatactgatattactgcatgtacttggacgactaaaaagtggccgtttactacaccaaaaggtaaagtattattacgtgcgtatgtaggaaaacctggcgatacggttgtagatgaccatactgatgaagaaattgtaaatatcgcacgtcgagatttaagtaaaatgatgacgtttaaaggtgatccagattttaccatagtgaatcgattaccaaaaagtatgccacagtatcatatcggtcatatgactcaaattcgcaatatacaaaatcatgtaaaacgtcaatataacgggttacgcattaccggtgcaccttttgaagcggtaggtttacctgattgtattcaacaaggcaaaaatgctgttgaagaattaatagacgagttataaataaagcatagtaaataggcactttttagaggttacatttgtctctttaaagtgctttattttaaaataaatagtcattattaagaagaaaaggagaataaaaaatgacagatgtaattattgttcattcacaaataggaaatgcacaaaatcattggtatcaatggttaaaacataacttagcactcgaaggatataatgtacaattgtttaatttagataaagcggataataaaaaattagatatgtggctaaaaactatgaaacaacaaattaaaatcaatcatcccgatacgtatgttgtaacacatggctatggttcaatcgctgctttgaaatttattgaacaattagatttaaaacgtccaatagaaggcttttttagtattgctggatttaaagaagatgctcaagacatcgatgaatctgttaatttagatcatattaccattgattatgatgaagttaagaaaaaggtgaaacactttcacggtctcgcttcaaaagatgatgaacatgtatcttataaagaaactgaaaagttattacaagctttaggaggatcaattcgaattgttgaagaaggagggcacttcctagaagaagaaggctttgtttctttcagtgaattacaagaaaaaatgcaaaaatatatgacacaataatgttagagcgggaaagtatcaaatagtaatataaagagtaataataattatgagattttatacccaaattatcccataaaataaaattttttaagtgtagcgtttttttacacaaattaatttataatttttattgactatataggtgttaatatatatactaataaagtattgaaaaaagcactaattaaaaaataattatctcataattatttaaatttataattaacgtattgtaaaaattattttaaaaaagtgttgacattacagtggcttaaatgatatattaattaagtactcatttgaagtgctaataatattggcgcgggatggagcagttcggtagctcgtcgggctcataacccgaaggtcggtggttcaaatccgcctcccgcaatacataattttataggtctcgtagtgtagcggttaacacgcctgcctgtcacgcaggagatcgcgggttcgattcccgtcgagaccgccattacttttgacttatgattaaggttcagtagctcagttggtagagcaatggattgaagctccatgtgtcggcagttcgactctgtcctgaaccatttacactttggcggttgtggcgaagtggttaacgcatcggattgtggttccgacactcgtgggttcgattcccatcaaccgccccataatcgttattaagcgggtgtagtttaatggcaaaacctcagccttccaagctgatgttgtgggttcgattcccatcacccgctccataatttaattattccgcagtagctcagtggtagagctatcggctgttaaccgatcggtcgtaggttcgaatcctacctgcggagccatggctccttggtcaagcggttaagacaccgccctttcacggcggtaacacgggttcgagtcccgtaggagtcatataaacagaagtgaaacatcgcttctgtttttttatttaattgaatagaggagagttgtccgagtctggctgaaggagcacgcctggaaagtgtgtaggcgctttatcgcgtctcaagggttcgaatcccttactctccgtacagtagctcagaatggttattttccattctgagttttttatagatatgatatatcaagtattcaactatatttatcttaaaatggataatatctttttaaaaataaaacaatcacaaaataaattcaaacatgagtcctgttaagtcatttaaaaatcgttataatatagagtgtataactattggaggaatgaattttggaattttggttaaaagagcaaagtataaaaaacaaaaacaaaatcgcggttatagatggtcagtatacattaacatataatcaattatattctacagcgtatcagctttcaaaaaaaatattatctttaaatgaaagtagggtaggactatatattggaaacgacattgattctgttattttagtgcacgcatgttggttagcgcaaattgaaattgcaatgatcaatacacgattaacaacaactgaaatgactaatcaaatgaactcagtgaatgttcaacttattttaactacaaaagagttcgatttatcttcacatcaagttctctcatttaatcaactcaatgattatcctgatacgcctaatcataaacaatttgatattcatcgtattgcatctattatgtttacatcagggacgacaggaccccaaaaagcagtacctcaaacatttaaaaatcactatgcaagtgcattaggttgtaaagaaagtctaggatttgatcaacaaacgacatggttatcggttcttccaatttatcatatttcaggacttagcgtgattttacgtgctgtgattgaaggatttactgtacgtttattaaataaatataatactgaagatatgttgactattattaaaaacgaatatcctacacatgtgtcacttgtgccacaaacgttaaagtggctaatggatgctggtttaaataaaccatactcaattgaaaaaatattacttgggggtgctaaattatcatccacgctcatacaacaggcattgagttatcaattacctatttataattcttttggactgacagaaacatgttcgcagttcctaaccgcttcgccagatatgttagctaaacgatatgatacagtaggtaaaccaagtgataatgttgaagtatgtattaaacaacctaatgaagagggacatggtgaattacttatcaaaggcgacagtgtaatgaacggatatttgtatcctaaagatttggataacacatttgaagatggtttctttaaaacaggagatattgcagaaatagacagtgatggttttgtaatggtttatgatcgacgtaaagaccttattattagtggtggagaaaatatctatccttatgaaattgaaacagtagctaaaacattcaatggaattatagatgcagtatgtgtacctaaagaagatgagacttggggtcagattccagcgctttactatgtcgcaagtgaaacaattgaggttaatgttcttataaattttttacaagaacatttagcaaaatataaagttcctaagatatatcaacacgtcaatgcattaccttatacttctactggaaaattacaacgtaataaagttggaactgaggatcattaaatgaaaatcattgatatacaattttattactataaagcgccgtttcattctccgattacgacgcctaaagtcgaaatgacacatcgtaaagcactcatagtacgatttatttctgatgaagggaaaaattattttggtgaatgtaatgcatttgaaacggattggtatgatactgaaacaattgagacagtaaaaatacgaatacaacaatggtcaaaaaagattttaaatcaatcattcaatacatttagtgactggttaccttatcttgatgtattagatagttatccagctactagatgtactgttgtgatggcggtttatcagatgttttattcacaaccgtgctttaacgttgaatatggggcaacagtaagtggtttatcttcttcacaattacaaacacttaaagacacaaagccagcacgtattaaattaaaatggagttctcatctcattaacgatataaaaaagctacgcaatgaacttccatttgaatttagtcttgcactcgatgcaaatgaatcactggatatgtcacaatttcaattattaaaagagattgatcaacacaatcttctatacgttgaagaaccatttaaagatttaaatgatttaagctatatagatgttacgcattatcctgctattgctattgatgaaaaagcaacggatgtacaatcaattttgaaaattattcatcaatatcctataactgcggttgtggttaaaccatttagactgggaggaatagatagagcgctagaactcattcacttattaaaagagaaagatattaaagtgatcgttggtgggatgtatgaatatggacttagtcgatattttactgctttattagcaaaagaagggtcttatccaggagatattactccagatggatattattttgaaacagactttacacaaggcataggcaaattaaaagaaggattgatatatttcaatccccctaaagttaatataaatgcattatctgtttatgaatgatgatgtgtatgtttgtctttttttaaaggtacgggatcaaatccaccttcatgaaatggatggcattttaaaatacgttttactcccatatagccacctttaaatgcgccatatacttctatagcttctttagtatattcagaacaagtaggatagaatcgacatgttggtggtgtcataggggagatgaaacgctgataaatacgaatgatgcttagaaataattttttaagcataaataaacctcctatagacatttgattattaaataattttatcatatttaagagggggatgagtgatatggagtttatcgatcaagatgatagacgagtcacgatgcaatataaaactgataacgatataccgaatggaaaccacgttttagctattccgatatttcaaaatcaattattattcactaaacactctaaaagaggtatcgagttccctggaggtaaagttgaaattaatgaaactagtcaacaagcgattgctagagaactttatgaagaaacaggtggaaaggtagaagccttatattatatcgcgcaatatcaagttcatacctttgataagtcactttttaaaaaagatgtgtacgtgattaaagtgaaatcaattgaacataaacatgattatttggaaacagaaggtcctatattatttcatctagttaatgagattcctgagcaccaaaaaagttatttaattaaagatgaagcaattttaaaatgtttagaaagggtgaaagatcttgggtattacaaatattagaacaatgcctgttgaatccaacactcatcgatttgaggaaataacttatacagtagacgaattaaatgtaaaagcgttacagatgatcccaacgtatcataatgttaaacgaattgtagtgtatttacgtggtggaaaagggcaagttggtagagtaagagcttcaagactcatgcaattttctgatccgtatacattagttataggtccctattatagaggaagtaatggtagtgaaggaaaagatgaattttgtaatgctgatttacatgatgtaacagtacttattcgattattaaaaaataagtatccccaagctttcgtccatatgattggattttcaagaggtggaattcaaggtttattatcatttcaggatgatccagttgatagttatattatttggggtggcgtttcagatgttcatttaatgtatgaagaacgtgtggatttaaggggaatgctaagacgtatggtaggtcatccgaaaaaagataaagaggcatatgaacaaagaaatgcgatacgtacgttgaatcaaaacagtccacctattttaattgtacatggtggtaaagattggcaagtgggtatacatcaagcgtattttcttcaagaacaactagaacgtaaaggggtcaaacatgatacattttatcaacttgacgaaggccatgtcccaagaccgaaagcattgaaagaagttttagattatatacatcaatggatgaataatatagaacaagacttacaaagatgactataacagttatcatgtaagtcttttgtttagatatattattaatgactaaatccaccatctttagcaatatcttttacttcatctccaaatgttttgaagttttcttcaaaacgttgttttaagtcattagcttgatgacgataagcctcaggatcattccaagcatggattggatttaaaatagtcttaggcacatcttccatttcagttggtatacttaaaccaaatatttcatctttagtaaatgtagcttgttttagcttgccagaaatagcttgatctaccatataacgtgtataatgtaagctgatacgacgtccaacaccatattttccaccagtccatcctgtatttactagatatacatcaacatcatggtcatcaattaacttaccaagtaaattcgcatatttagtaggatgcaaaggtaaaaatggagcgccaaagcatgttgaaaatgatggttcaggttctgtcacgccacgttctgtgccagctaattttgacgtaaaaccacttaagaaatgatacattgtctgagatttagataatttagaaataggtggaagtacaccaaatgcatctgcagttaagaagataattgtattagggtgtgcagctttagaaggtaatacgatattatcgatatgatgaattggataagcagcacgtgtgttttctgtgttcgtattatcatcaaaatcaacatggccacgttcattaacaattgtattttcaagaatagtaccatattgaatggcattataaatttgaggttctttttctttagataagtggatagcttttgcatagcaaccaccttcaatgttaaaaataccatttttattccagccatgttcatcatcgccaattaatttgcgagttggcgtcgctgataatgttgtttttcctgtaccagataatccaaagaatagagcaacatcacctttttctccaacattggcagaacaatgcatactcataatatcttgcataggtaataagtagttcatcactgaaaagataccttttttcatttctccagcgtattcagtaccaccaattaaaatcactttatgtttaaatgaaacaataataaatgtttcagaatgagtaccgtcaacatctggattggctttaaaatgaggggcagaaacgatagtgaaatttggcttaatatgacttgcttcctcaatagattcaggtcggataaacatgttttgtgcaaataaattatgccatgcaagctcattgataatttttaattttaattgtgagtctttatcacttccggcataaccgttaaaaacgtataattcatctttttgatctaaataatctaatactttgttgtataattttaaaaacacgtcttcatctataggttgattaatgtctccccaatcaatattgtctcgatatgaaggttcgttaacgataaatttatcttttggtgaacgaccagtatatttacctgtactcatattaattgcgccaagttcagtaagttcaccttcattattatttaaaatcttgtaataaagctgagtagtagaaagttgaaataaagtcgtttccttctctaataagtgtttgattttaggtgtttcactgtatgtatctattgacatacaacatccctccaaatatctattcatttatatgtgtaagcccttacattaaaaagtataacataataatttaattattccattgtaaataaaagaacatttaaaaatcaaaattgacaattttaaagtatttatgtagtataggtcttaacggattctcttatcctgagtggtggagggacatggacccaatgaaacccagcaacctctttttttaaaagaaaggtgccaaaccgtttgcagacgcaatatttgtctgaacgataagagcgaatggacgtttaagagccttctctctatctaggtagttgagaaggctcttttattttaagctcattgtcaaaagagaattttcgtaaatatagttaaaaaaaggagcaaatcatgacttataataaacgtttatttacatcagagtcagtgacagaagggcatccagataaaatcgccgatcaagtatctgatgcgattttagatgaaattttaaaagatgatcctaatgcacgtgtcgcttgtgaaacaacagtaacaacaggtatggctttaatttctggtgaaatttcaacgtctacatatgtagatattcctaaagtagtacgagaaacaatcaaaaatattggttatacaagagctaaatatggttacgattatcaaacaatggctgttttaacagctattgatgaacaatcacctgatattgcccaaggtgtagataaagcacttgagtatcgcaatgatatatctgaagaagaaattgaagcaacaggtgccggagaccaaggattaatgtttggttatgcaacaaatgaaaccgaaacatatatgccgcttccaatctttttatcacatcaactagcgaaacgcttatcagatgtgcgtaaagacggtaccttaggttatttacgtccagatggtaaagttcaagtaacagtagaatacgatgaaaatgataaacctaaacgtattgacacgattgtggtatcttctcaacatgctgaagacattgaattagaacaaatccaaaaagatattaaagagcatgtcatttatccgactgtgcctgaaggtttaattgatgatgaaactaaattctttattaatccaactggtcgatttgttattgggggtcctcaaggagatgctggtttaactggaagaaaaattattgtagatacatatggtggttatgctcgtcatggaggtggctgtttcagtggtaaagatcctacaaaagtagatcgctctgcggcatatgcagcgagatatgttgcaaaaaatattgtagcagctggattagctgagcaatgtgaagtgcaattagcttatgcaattggtgtagcagaacctgtatctattgctattgatacatttaaaacaggtaaagtttctgaaggacaattagttgaagcggtaagaaaacattttgatttaagaccagcaggtatcattaaaatgcttgacttaaaacatcctatttacaaacaaacagctgcatacggacattttggtcgtactgatgtattgttaccatgggaaaaattagataaagtgaatgtcctaaaagatgccgttcaaaaataacataggatatatagcagttaattaggttaaacctcgaaattatcgtctatttctattataatagatagatattgacagtttaaaaggagcgttatctaatgaattcatttggaccggttgagattggtttaattgcagcgataatcatagcgattatatgttttattctatttttagttgctttgaaaagtaaaaataatatgaaacacaaagcgaatgaagagtacaatctcaaggagcaacaactcaaatcttcacatgaggaagcacttgaaaaagaacgtattgaaaataaaaaacaagtaacgaaacaaaaagaagaatttgaagttacagttaatggaaaagaacgtgaaattgatgctttgaaattattttctaaaaataaaagtgaatacgtgactgatatgagactcattggtattagagaccgtttagttaaagaaaaacgtattagacgtgaagatatgcatataatggctaatatttttttaccaagtaatgagtttaataatattcaacgtattagccatcttgtgcttactagaactggtttatatatcattgattcacaattattaaaaggtcatgtttataatggaattagtggcgcacaatttcaagaattaccaatgctgaagcaagtatttgatacacttgatttaaatacacaagcgcctcaaacgttagttcttgatcaacatgaagataatcattcgaaactatcatttattaattattctgatcaactttctgcaattgagaagttggctacagatttacaaacagaattaggacttaaatatacgccaacatcaattttatattttaatcctaaacatgataaagacgtaacgatttcaaactatgcacaaagttcaagtgttaaggttttagttggtcctgaacaacttgacgaattctttaacaaatttgtattccatggacgtattcaatataatgtcgatgaattacaaaatattatggataaaattgaatcatttaactaagagaggctaccatcaaaattttaaattttgatggtacttttttattataagcgatgttcataaatatacttttagggtatatacagaatagttatttttaaaggaggaagtaagatggactatattgaattctataatggaaatcaaatgccaatgttaggacttggaacatttcgagtagaaaatgacgatacttgtaaagaagcagttaaacatgctattgaatctgggtatcgtagcatagatactgctaaagtatatggaaatgaagaacaagtaggccaaggtatcaaagaaggattagaatcaacaggtttaaatagagaagatattttcgtaacatcaaaattatttttcgaagatttcggacgtaaaaatgtggctcaagcctacgaaactagtatccaaaaacttgggttagattatttagatttatacttagtacattggccagggacaaatgaagccataatgattgatacatggaaaggtatggaagatttatataaagataataaagttaaaaacattggagttagtaattttaatccagatcattttgaagcattattagcacaagtgtcaattaaaccagtcattaaccaagtagaatttcatccatactttactcaagaaaaacttagaaaatatttagaagctcaaaatatttatatggaatcttggtcaccatttatgaatgctcaaattttaaacgatgaaacgttaaatgaaattggtaaagaagttaataaatcagcagcacaagttattattaaatggaatatgcaacataacgtcgtcgttattcccaaatcagttacatcaagcagaattgaagaaaatatagatgtatttgattttgaattatcagcagagcaaatgaaacgaattgatgatttaaataaagatcaacgtataggacctgatccagatacatttgaaggtcaataaatttaattaaaaaagagtgaacttgtaggttaatttactacacagttcactcttttgttatattataaaaccaatccaacaagcaataaatcctataacaaattgcaatagagaatacatcataaatttaaaaagtttaaaagacggtgttagacattgcgcaagctcataagacatggttgaaaatgtcgttaaacctcctaaaaatccagtaataaaaaacatatgtatccagtttaagtgaatagagaggccagttgttaaaccaatgagaaaacttccaatccagttgacgattaaagtagcaataggtattgaagtagaccatttggatttagtgacatcagttagccatgctctaacgacagcgcctaaaccaccgccaatcataattaaaagagcttgtatcaagatgtaagacctcctaatgtcatacctatccagcacaagataacaccaaagcaataacttataaatgcataaaccaaagctaagataatatgatggctgtaaagtaatgtgactaactcaaattgaaatgttgaaaatgttgttaaagcgcctaaaaaaccagttgtaataccttttttaattttagggtgatctttaaataatttaatcattactacagatagataacccataagaaaagcacctgacaggttagctatcaatgtgccaattggaaaggtgttactttgattcataaaggaaaacaaaaatcttaataaagcgcccaacataccacctataaacacggttatatattgcataacatactcacctttatatatcattttatgcgtatttgattatgaaaaaatgccaaacgttgtaatagaagcaaaaatatggaacaaaattactaccaatatgagataaggtaatatgttagaagcggtcttaatccaatctttatttttataatttaaatgtttaattgctttatcagaaaatataattgaagccataaggatgacaacatttacaatactacatgcaattaataaattttttattgatttaaattgaatgcttaataaaggattaaatgtattaaaataaaagctaataattaaaagaataactgatatataaaaatatttttttgatttagacataatatacctccgatttataccattaaataatattaccatatttaatttcatttttaatagtacctttatcatatggttttaattttcagaaaattaaaagcaaaacattcgcatacacaaaaaaagcatgatataaataacataacgaaatagtaaaacatcctgtacataaaaaaataatcatacatatggtgtcttttcataaagcaagctatattcgtaatataaatgagaagggaagattttatgactcaattaaatgtagacgtatttgctgatggtgcagatatcgaacaaatgaaagctgcatacaaaaataaagaagtagatggttttacaacaaatcctagcttaatggcaaaagcaggtgtaacagattataaagcttttgcagaagaagcagtacgtgaaattcctgatgcttctatatcatttgaagtattctcagatgatttagacacaatggagaaagaagcagaaattttaaagcaatatggagacaatgtgtttgttaaaattccaattgtgaactcaaaaggtgagtctacaatcgaattaattaaaaagttatcagctgatcatgttcgtttaaatgtaactgctgtttatacaattgaacaagttaaagctattacagaagcagtgactgaaggtgtacctacatatatctctgtctttgcgggacgtattgctgatacgggtgtagatccacttcctttaatgaaagaatctgtaaaagtcgcacatagtaaaaatggtgttaaattattatgggcaagttgccgtgaagtgttcaatgttatccaagctaatgaaattggcgccgatattatcacttgtccagcagatgttgtcaagaaagttaacaataatcttggacgcgatattaatgaattgccagtggatacagttcaaggatttgcaaaagatattaaaagttctggattatcaatattataaaatcactatatctaattatgatcaaccgagtctaagactacaaacatgtcttagactcggttttagtgttatatgaatatcaaagagaaggagtaataaagtatcttgagttgtatctttcttttttattgagtttgttttaaaatcggtgttcagttaaaatttataaatataattaaatagaaaggaattaagttatggaagaaactgcttttagagaaaaagtaagaaaacaattgtggtttttaaatagaaaagaaaagcaattattagaacatacttttgaacaaaataatgcttcatttaataatgcagaacagaaatttatgaaacctactcgttttgctaatcaatttttacaggtttatatttttcgaaataaacatttttcaaatggatattttttcttattaattatattatttgttctcacatacattctattgctaggatggtttttagctggatttatcgcaagtttagcagtagtcaatcagtttataaatcctaaagcagaattaagtctaatctatcttgtattaatcttagtttttgccattattagtttgattgtcagtttgtatctcataagatttgtgactgctttgtttactaaaagattacttgaatataaatttaatgaaaagaagtcgtcttattaattaaataggctaatagaatactttcttgccattttttataaactaaaatgtaaggctcatccactacgcattgagctgaattatcaaaggtaataatggttttattttgagaagacgttaatccaataatacgttgagcattaaaatatatttgtatgggtgcgcgttgatgtttgattggaaataaaatgacgtctttagaaatgtaaataggaactagtttattgatagataataagcgtttagctaatttaagttgttgtgtatatgatttattaaattgttctagatagtatatgacaatctttttaatatgaaagggtagaatcatatcatatgttttaaaacaacatttagtctgaattgtggaaccttctaaagtttgaatgtataacaaatcgaaagtattatgaggtaacatgccaatcaccttctaaataatattgctgaagtttgatacgggcagaagatttatattttttaattgtagtgtctgagacattcatctttttagcgatttcatattgtttgtatccacgaagataatatatcagccattgatattcatttgaatttaaaatatatttgaaatcattaaaaaaagattcatctttcaatgtataatttaaagaatgatttaacgctgcaatatctaagcagtcaatcttcaattgctcctttctaaaaagatcaataagataaaactttaatcgctgataaataaaagaggataaagatacagaggaagatgggttataaattttggagatttcccacaattttattaataataattgataaaattcatcataattataagtgatacggtattgtcttaacaaatgatgaatcattttatgatattttatgtgtaatgaactaaaatctaaaatagttattctttctccttagttatgtacataaacaatatttccggatgtataaattctacatgaggtatcgtgaattttcatttgcttaatttaataaataggtgttaaatagtaaacatagaatcgttggattggatgatatatggctttaacaagtttgtaagattaatattcgacatttgtacaataaaatataggaggtatgaagttggattacgcacatttaaatcttgagcacttttttgcaagacatgatgatttagacgtcattagagatcgttctgaatttgtaatgataaataattttacaaatgaaatgatgtatcgtgatggtgatattgaagggacaattgatttaaatcaatattattataagaatagatcgcaagctgtcagttttattatgatggattataaaagaaataacgaataattaaatatgttaaccttactacaaataactatatttatttaatagataaaaatcattgagtaatgaaatgttgagtatttcattactttttattttttattaaatttcaattttgttacttttattttatgaatatgtaacattataattataaaattgtttatgagaattaaaaatgttagaatttattatcatagatgacttttctataaatgaaattacaacattaacctaagaggtgtgaatatgacaaagcacagaaaaggttctattataggcctaatagggttacttattattttagtagcagctggcttcatttttttctcaatgatttctgatcagatatttttcaaaaaagtaaatgaagtagagaaagttcaacatgtgaacgtcacgcttgataaagctgctgcaaaacaaatagataactatacaagtcaacaagtatcgaataaaaacaataatgcatggagagatgcatcagcaagtgaaattaaaggtgcaatggatagtagtaaatttatcgatgatgataaacaaaaatatcaatttttagatttatctaaatatcaagggattgataaaaatcgtatcaaacgtatgttgttcgatcgacctacattattgaaacatactgatgcttttgtaaatgctgcaaaagaaaaacatgttaatgaagtctatttaatttctcatgcattattagaaacaggttcagtaaaaagtgaacttgcgaatggtgtaaatattgatggtaaaaaatattataatttttatggcgttggagctttagatgaagatccaatcaaaacaggtgctgaatatgcgaaaaaacatggttgggatacaccagagaaagcaattaaaggtggcgcagactttattcataaacacttcctatctcacgatgatcaaaatacattatatagcatgagatggaatcctatgaatcctggtgaacatcaatatgcgactgatattaaatgggctgaaagtaatgcggaaattattgctgatttctataaagaaatgaaaacagaaggtaaatacttcaagctatatgtttataaagatgatcaaaaacatcaataatcaaaataaaaaccaacattatctttaattagatgatgttggtttttttatttattcagctttgttttttcttgaagcccaagtaaatccaatgataaaaacaattaatgtttttaataaaaatttcattgtttagtcacctcaatatctaaattttaacatagttacacatgattatttatgttttgaaatggatcatcgtgttaatagtgaaacattttgaagtcgagaatcgtattggtataatatgataatattcaacataatacaaatatataaaaggatgatgttaaatatgcgagtagcaattataggcatgggtacagcaggtgtaagtgtacttagacaactcgttaaacataaagactttaagcaattaaaagtcgatgtctacgataatgaatttaatatgggacagggtgttccttttcaaaatgatagtagtcaattattaattaacttacccactaaaaagatgagtttaaatttagatgatgatgaagagttttggaaatggtatcaaacacaatctgattttacgtttaaaaatccaaagtatttaccaagatttgtttttggccattatatgaaatcatacctatcaaattatgagacattatatgataaccttacagtcattaaacaaccagtacaagaagtcttcattaattcaaatatagatgaaaccacattgaaatattatgtctgtacgtctaaagatatgaagcattgtcaagtatatgattacatatttttaactataggtactttatcatatcacgatccttatcatttaaaaggtataaaaggttatattcaaactccttaccctacatataatactttagatgatgtacaagaatctgatgatattgctattattggaacaggattagctagtttagatgtagtgcgttatgtagcgtttcatcatcctaaactacctatcacaatgacgagtcgttctgctcaattgcctagcgtaagaggaaacatgaaaaaaattgagtttcaatgtttaacaaaatctaaatttaatgatattaaagataagtactttggaaatgtgccattagagaaagcattcgatttatttaaagaagagtgtgatttaaatggtattgatttacagaaattggttcaccgccgaacaggagatacgattaaagatttaaattatgatttagaacatccagatgagataggtatattccaaacattaatagagaatgtcaaagaaaatttaaattggatttggaatagttttagtcgtcaagatcaaattgaattcgataaacgtttcactaaaattattcaacttaactcaaaccctatgcctccaagaactgcaaaactcatcaagcaattaataaaagatggttcattagtgattagaaaggatttagaaaatgtggtacataaaaatggactatttaatttaaaatttaaaaatgatgaacaatggtatccacatcatattattattaatgcaacaggttctaaaacacatttaaaagatttagatgaagatgatcaatttatcttaaatcttcaaaatcgacaaattgttcaagcccatcctatgggtggaatacaaattatcccagaaacaaatcaggtgattagtccaagatatggtactttaaataatatgattgctattggacaaatcactaatggagtaaataaattgcggaatggagtaaaaatgattgttaatcaagcggtaagtgcagtggattatttatatgaaattcgaaaagaatttgatcatacagtataatgctttacacaataatgaataaatatctctttaagagttaaatttaaaaatcaaattgaaattctttatttgtaattttccaaaaataaatgtaagatgatatatgtagtactaaactacgatgactcaaatttaatcacaatttcatacgtattctttcggggcagggtgtaattcccaaccggcagtaattaagcctgcgacccacttaatcttaatttattaagtggctgatctagtgagactctagagccgacagtaaaagtctggatgggagaaagaatcaatcacatcattactgaatgatgtataagcatgcacaatataaaaattgtagtacgcttatttaagtatatacatgccctatgcctgtgaaacaggtatggggtttttttagaggtgataaattgagtgaatttatgaaatatgcaattcaattagcacaaatggtgaagggacaaactggagttaatcctcctgttggctcagttgttgtgaaggatgggcgtattgtgggactaggtgcacatttaaagcaaggagagaaacatgcggaagttcaggctttagatatggcacaagataaagcaaaaggcggcaccatttatatttctcttgaaccctgtacacattatgggtcaacaccaccttgtgtgaataaaattattgaacatgggcttagtaaagtgatttatgctgtaaaagatacgacgttatcttctgagggagatatcattcttgaaaaggcaggtattgaagttgaatatcaatattcagaagaagcttttgctttgtatgaagatttcttcaaagcaaaacaacataaaatccctgaaattacagtaaaagtctcgacttcgttagatgggaaacaagcgactgatagtggacaaagtcaatggattacgaataaagctgtaaaacaagatgtatatcgtttaagacatactcatgatgccgtattaactggtaatggaacgcttgaagcggataatccacaatatacaacacgtattcaagatggtaaacatccaataagaatcatactatctaagcgaggtcaaattgattattcaaaacagatatttcacgatcaattaagtgaaatttggatttatactgaaaatcatgaactaaaaagtccaagtcatcatataaaaataatctatttagaaacatgtaatttaaaatctattttatctgatatatatcaaagaggtgttggcagattattagtagaagctgggcctcatataacttcagaatttctccaatctaattatttagaccatcttattatttattatgccccgaaaataataggcggtattggaaaaaatcaattttatcaaactgataatgtcattgatttagctaatgcgccacaatttgaagtgatttctaccgagtctattcaacaaaatattaaaatgacattgcgaaagaagtgaagataaatgtttacaggtatcgttgaagaaataggtactgtaaagcgtattcgcactcaacaatccgtaaggacattagatatttcatgtcaaaaaattatagaagatatgcatattggtgattctataagcgtaaatggtgcgtgtttaacagtcattgattttaaacaaaatcaattttctgtccaagtgattaaaggtactgaaaataaaacctatttagctaatattaaagaaaatgatgaagtcaatcttgaacgtgcaatgtcaggtagtggacgtttcggaggacattttgtattaggtcatgtagatgcaaaaggaacaattataaatatcagagaaacgcctaattcacgcattgtatctattaaggcatcggactcggtcatcaaacaaatggttaagcaaggttctattactgttgatggcgtaagtttaacaatttttgacttgcatcaacatagttttgatatccatcttattcctgaaacaagacgttcaacgattctttctaataaaaaaatgggcgatgaagttcatcttgaaacagatgtattatttaaatatgttgaaagtatagttggtaaaaataaatctgatttatcagttgataaattaaaagcatatggtttttaggaggggcttaaatgaaattcgatagcattgaagaagcgttagaagcattaagaaatggcgatagtattattgtagtagatgatgaagatcgtgaaaatgaaggtgacttaattgcagtcactcaatggatgaaagatgataccattaattatatggccaaagaagcgcgtggattaatttgtgctcctataagttcacagattgctgaacgtctaaatcttaaaactatggttgatggtaatacagatgaatacggtacaaatttcactgtaagtatcgatcatatctctactactacaggaattagtgcatttgatcgtacagcaacagcgaaagcgttaattaatcctgattctaaaccagaaagtttccataaaccaggacatttatttcctttagtgtctaaagaaaaaggtgtattagttagaccaggacatacggaggctgctgtagatttagctaaattaactggtgctgcacctgctggagttatatgtgagataatgaatgacgatggtacgatggcaaaaggtaatgaattacaacaatttaaagagcgtcatcaattaaaaatgattacaattgaaagtttaattaattatcgtcgcaaacaagaaagcgaaggtattgaacttaaagcaactgtaaaaatgccaacggatattggtgattttaaaatgtatggttttcaatctcaatatacacatgaagatattgttgtacttggcaaaggagaaccacgtacaactgaaaatgtaagactacattctgcttgtttaacaggtgatattttccacagtcaacgatgtgattgtggcgctcaattagaagcatcaatgaaatatataaatgatcatggtggattaattatttatttaccacaagagggtagaggcattggtttaatgaataaactaaaagcttatgaattaattgagcaaggacatgatacggttactgcaaacttagcattaggttttgatgaagacttaagagattatcatatagctgctcaaattcttaaatattttaatgttcaacaagttaatttattaagtaataatcctaagaaatttgaaggcttggaagattatggtataaaagttgcagatcgtacagaaattattgtgccagaaacggaacataatcatcattatatggaaacaaaaaaattgaaaatgggacatcttatttaggaggaatttagaatgaattttgaaggtaaattagtcggtacaaatttaaaagttgcaatagtagtgagtagatttaatgattttattaccaatcgtttattagatggagcgaaagatacattagtaagacatggtgtagatgaagataacattgatgttgcgtatgtaccaggtgcatttgaaattccacttgttgctaaaaaattagcgcaaaaaaatgattatgatgcagtgattactttaggctgtgtcattagaggtgcaacatctcattatgactatgtttgtaatgaagttgctaaaggcgtatcaaaagcaaatgatgttacgaatacaccagttattttcggtgttttaacaactgaaagtattgaacaagcagttgaaagagcgggtacgaaagcaggtaataaaggtgcagaagcggcagtaagtgcaattgaaatggcaaacttacttaaacagttttaattaatgtagagcgtctcgataattttaaggattatcgagacgctctgtatttcaacgttttagtaatttcacaatactagatactaatgtaagtgttcctaaagctagtccactaactaagccaattttttttagtgcttctgttgaaataaattcttgataggcaagggaaagattttgaggtctctcagccaggcgacgcatgaaataagcaaaccagtcattgccatatggaacataaacggtaaagtgatatccttgtctagcaatctcttctgctaattcattacgaaaaccatacaacatttgaaattcaaaagtgcttttttcaatatgatgatctttgacaaattgtttaacatggttaatgattttatcatcatgtgttgcaattgacgtaaagtttttggcattaagtaaacgtttttcaataatatttatataatttttatctatatcttttttactttgataagcaatcgtatcattttctttataagcgcctttgaccagtcttaatcgtaattctgggtacttatcaattaatttctctgcatcataaaggtatccttgaataactgtaccgacatttctaaattctccttttaacctgtctaaaatctgtaatgtttgtgataagctgttatatttttccatatcaatattaatatgcatattatcataggtattagcctttaataaaatgtctcttaaattttgataggctaactcagtatcaaattcaccgcctaatgaactcactttcaccgacatatgtgcactcacttgatatttattaatagcttccattatctcaagaatttcatttttagcttgagtcgctgctgctttagtattaacaaattctccaagattatctacagtaacatcaatatgtttagcgtttaaacgttcaatcgtatcaatgagttgttctatagtattacccgcaacaactctattagcccccatggtaggtccgatttttttagccatttcatttaaatatgtaatatttgataatgttatgaaaaaatctctgaataaagacatatctattcctccatcccactcgtatctatctctataacaagtttagcatgaatacatcgtttaagaaagcgtttacatttaggaggtaaaatacgtttaaattcattagtcataaattaagagaatctatatactgtttaacaacaattaaaggtataatttgatataatacatttgataaacattcaattagagaggattcaaaaatatgtggaagtgggaaacagaacatgacgctaaaggcgtaatcatcatagtacataatatgttagaacatactggtagatatgcgtatgtgattacgatgttgagacgtaatggttatcacgtaattatgggtgatttacctggacaaggtcaaacttcacgagctaacagaggtcaactacaacgttttgaaatttaccatgaacagttagttgaatggataaaaattgcaaacgaatataaattaccaacatttgttatgggtgttggattaggtggtttaattattctcaatttacttgaaaagactgaactacctattgagggcatattactactctctccaatgcttgaatttaagaaaaattataaaacacgaaaaaatatgtttatatctaatattggaaagagctcaaaaggtacacaatttaaattaggaatagattatgaagatttaactcgtaattcagaagtgattaatgagacaaatcatgacggattgatgttaaagaaagtatcttacaaatggtttaacattattaatgaaacgatgaaagacacatcacaacatattaaagatatcaaaccgttacccactttattaatgtatggtaccgaagataaaattttagaaacatcttcaatagatattttaaaacaacaatttcttgcagatgaattttattttaaagcgtggaaagggttttatcatgagattcacaatgaacctgaacgagatcaagtcatgagatatatattaactttcttgaataatagcgtaaatacaatgggatttattgtacaagaagaagatattgaggaagtataagataatctttaaaaatctataaagaatagctcgtagaagacagatatctacgagcctattctatatcaaaattatggttataatattataaatgagctaaaattacaatataagtagaattataactatcaattactttttataaattgtatgaatttagtactgtctcttatacacatctgacgctgcttttttttttcaagcagaagacggcatacgagattcctctacgtctcgtgggctcggagatgtgtataagagacagaaatagaaaattagatattctatcaaatgaaataaatgattactttgttattaataatactactaaaaattccaaagaaaatattgatgatgaaatttttgataagaatttagtaattgatacagtaagttatgaaaaatataaatatttacaaaatcaaatatttgatttaaaaaaatatattaataaaaatttctaaccttttttcttttgcttacgagttcatacatactatttacacattaatatagcattacatagtcgtttatatttaaatttaattaaaggagaaagatagaatgtacttcaatgattggaaagttactattaacggaaaaggatcacatgatgttgtgacaaatgaagatactttgttaattttgcaagattatcaacatgttgaaatagcattaaaattagtaaacgatactattcaagtaaaatcattaggatatggagaggatgtaagcattaaccctactacaaaagaaataacggttaatgtaacaaatttattagaagatgatgagtaattaattaaaggaggttgagagatggaaaacttaagtaaacaattagttgatagtttaaaaaataaaaaaagataaccccaggcacataggaatgctcagtgcatattgcatatgcacctacccctttttgggacccagcgttaatccttctcgagttatcttaatcacattataagttacattgcttattatttcaagaataattattgggtagctcgcctaccctcctataaattcacttacaacaatattattactattaccgcaccaatgagtaaccattctcaaaggtgtgttcaatccaatcaaacgcatgcgggcaagtagaaaggattgatttacaatgattaagaaatataaaaagaaagacggctcaacggcgtatatgttcgttgcatatctcggtgttgatccaattactcgtaagcagaagcggacaacaagacgtggctttaaaactgagagagaggccaaaattgcagaagctaagctgcaaacagagatacaaagtaagggatttctaaataatgatattacgacttttaagcaagtatatgagttatggctagagcaatataaatgcaccgttagagaaagtacatttgttagagttagtaatatgtttaaaataaaaatacttaaagaatttgataatatgcctattcaaagtattactacgccttattgtcaaaaagttataaactactggatagaaaattataaggattttagaaatattaaggtatatgctgcgaatgtatttgaatatgccgttatgttgaaaataatacatgagaatccatttaaatatactaaattaccgaaaagaacaagaaataaaggtaatgagcatttaacctattattctagtgatgaattaaaacaatttctagaacttattaaagatgatttaatgtattatgctatgtttcgacttttaggatttacaggtatgcgtagaggagaattaatggctttaacttgggaagatataaactttaaaaataaaacaatcagtatagataaaactgttactattggacttaacagtaaagagattatacaacctcctaaaactcattcatctataagagttataagcattgatgatcgtactctttcaatattaaaaaattggcgtgtagaacaacgtaaactttgtttaatgcatggacataacacaagtaataaatcacaatgtttatttacaaatttacgaacaaataaacgtcttcaagtgcagcaccccaataaagcaatggataaaatatgtaaaaaatataactttaaaaaaattaaaattcatggttttagacatactcattgttcattattatttgaagcgggcttatctattcaagaagtgcaagatagactcggacatggcgatattaatacaacaatggatgtttatgctcatattaccgaaaaacaacgtgaaaaagttgctgagaagtttgctaattatattagtttttaacaataacgtattcaaaacgtattcaatttataattactaaaaaaataacaagctagaaaccacgtagttataacgtttctagcttgtttttacaagttatttatattccggcacaataactctccagccatgtttatcttctaatttaccactttggatgccaatgtatgtgtcatataattttttagtgatttctccaggttcgttattattaatcacaatttctctatcttcatattttaatgtacctactggagagatgactgctgccgtaccagaaccaaatacttctgttaattcacctttatcgtaagcttcgaataattcatcaatagatactttacgttcttcgacttcatagcctaattcttttgctaattcgataattgatttacgtgtaataccaggtaaaatactaccatttaacgcaggtgttactaatttgccattttcaacgaagaaaatgttcatactacctacttcttcaacatatttttgttcaacgccgtccaaccataatacctgatcatatcctaagttattcgcattcgtttgtgctaataaacttgctgcatagttacctgctactttagcaaatcctacccccccacgaactgcacgtacatattcatcttcaacataaatttttgttgattttaatgtatcaccgccgtagtaagcacctgatggagataagataattaataatttatattttttagaagcacgaacacctaaaataccttctgtagcgaatacgaatggacgaatatataaagattgaccttcgccttctggtacccaatcacgttcgatatcgacaagttgtttcaaaccatctaataataattcttcatctactttaggcatttctaaacgcgctaatgaatcattgatacgtttgaagttttgatctggacggaataatacgacctcaccattatgtttatatgcttttaaaccttcaaatacagcttgaccatagtgtaaactttgtgctgctggagaaatttcaaacggtgcataaggaacaatttttaattcttgccaaccgcctttttcttcatcataatctacacttaacatatagtcagtaaaatattgcccaaatccaagatttccttctggtttttctttaagtgtgtcacgttgttcaaatttaactttttctgacatgttgaagcctcctaatatatttcatgaataagatttaatataaattatagcaatctcagatagtctattcaataaattttctaaaaattcaaacaaaataaaaaatgaaacccttttctttttttattctttaaaagagagtcaaattccaaaggcacctttttaattatgaacttatgtcttttctttaatcgttcgtatcattgtttctgtcattttagccaaatgatactttggattaaagccccattcttttcgagaataactggtatcaatattatctggccatgtatctgcaatcgtttgtcttactggatcgacatcataatctaaggtgaattctggaatatatttctgaatttctttcttaatcatctcaggttcaagactcattgcgcttaaattataaccattgcgtgttacaagtttcttactatccgcttccataagttgaataatcgcatcaatggcatcatccatatacatcatatccatatacgtatttttagcgatatagctcgtgtagtgaccatgtctaaccgcttcgaaatatatttctactgcgtaatctgtagtacctccgcctggctttttggcatgtgaaatgagccctggaaatcttacactacgtgtgtcgacgccaaattttttaaagtaatattggcataataatttacctacaactttatttattccgtacattgttgtcggttgttgaatcgtattttgaggtgtgtttttcttaggtgtagacgcaccaaatgccccaattgaacttggcataaagaaatgtaagtcatacattcttgcagtttctaaagcatttattaacccacccatatttaaatcccaagcctgcaacggatttttttcagctgttgcagaaagtaatgcagccatatgcataagtgtatctgctctaaagtcttctactacacccatcattgcgtcacgatctgttacatcaagtaattcaaatgggctgtcactaatcaatgaatgtggttctggctctctaatatcagtggctaatacattatttttcccatataattgtctacattttagtaccaattcagttcctatttgtcctagtgctcctgtaattacaattctcttcattgtcatttctccctttgtcttatatatcctaatagtgtttttttagaactccccatattcctagattcactatgttataaaaatgcttacatatatcattagattatacgttaaagtgataattttattcttctaataaattatttgatttaacttacgttttgtttgttaatcatttttaaaattatcgtaaattatttttttccttcttatatctcaatgcctataggctactataaacttgttaattatttttaaaaggaggcgaatatgaagaaatattttgtatcactcttattgattttctttatacaataaaaataccgtatcagccatggctacgttatcactgatacggtatctatgttttatacagtatagggttaattaatttgttgagcttttttataaaagtattgtgccaccactatatctacaatagctaaacctactgatttaaatactgtcacttcttcttcatcatcacgtccagatatttttccacttacaatatctcctagttcaccatgtagtgattgctcagtaatgataccttcttctaatggtacttttaaatcacctgtttcttccattgctgcttctgtagattcaacaactattttattagcaatcaacatcgtttctgaaggtagttcttgcatttcaggtttaaatgaacccactgcatttaaatgaacaccgggatgtaatgaatgagaaaataccggtttatttgaatttgtagctgtcgcaacaatatctgcgttttccatggcttgatccgcttcatcgaagacttttgttgacacgtgatacgtttgtttcacaaattcagccaatttttcagctttagttcttgtacgactcgagatatgaagcatttcaatatctctcactgctaatatcgctgcaatgagcccctcagcttgatctccagcgccaatcacacacaatgtttttgcatcttcacgcgctaaatattttgtagctacaccagaaatggcaccagtacgaatcttagttaaataactaccatcaagtacagcaagggtttctcctgtatcataatcacttagcaatacggatccagtaattgtttttttatttagtttaggattattaggggcgaaagtgactgttttaataccgacaatatttaattcgtctgataaagctggcatcactaaatatctattttctttattaaaaggtaatacataacgtaatggcgtttccgtttttccttctgaaaacgcctgtaacgcgtgaccgacttcttcaatcacttctttcatatctaataagttttgttgatcctgttcatttaaaacgagcatttcatagacctccactgtttggatattgttaaacaatagattagaagtagcaatcatccattttaattattatatattctaatcaattgaatattaatattttttatagattttattaacttattattgtgatgatatacaattgatgatatctttatattgtaaataaaaggtacagtttacatagtaaagtgccttgcgatttcataacaatatgaaactatttataaacttttgacacccatcacttttcttatgagaaaagtgatttttttatatcttactataaatgattgttgtaatacctgtttttcaatctataacaccttcattataataggtggctttattatctaaaaatacttttaaactgtgattataatatgtaagtttttggtctgcttcttcgatggtcatccattttgtttctgaaatttcatctttcatttgtatatctattacttcatttggaattgtagctttaaacataataaataatgtgtgtacattcatttgagtggatttaccttcattaatacttacgatatctccaatcttagcattaagacctgtttcttccattacttcacgtttcaaagcttcaactagtgtttctcccttttctacctttcctcctggtaatgaccaccccccgccatctgtattattaacaagtaatacttttctttcttgattttgtatgagtgcatatacgacttttaaatctttcacagtttcaccttccatcatttaaaatttcaaatcgacttactggctgaccgttttttttaatatacgaattaatttcatatcctccatgtttttttattactttttgtgaagcataattataaggattacatgtcattaatactttatgtatccccattttatttagtctatttagtgcttcttctaacatgcttgaagcataaccatttcctctgtatggtttggcgacgccatagcctacatgtcctccgatattttttaatttatcattaagttcatgacgaatatttactgcaccaacaatatcatcatttttaaaataaaataatgttgtagaaggaacggtattcatatttacgggtggatgatgcaattgttctaccatttgttcaaaagattgataatgtgcgacatcaatattagatggaataattttctcattgttatcataccaatattgtaaatatcgaattaaactttctttatctttatactctagttttcttaattcaagcatgtatacacctcttttttacaattagtgtaccactaaaaatgaaaaacaatccatttatacattaaaactaatagattactcaaattaattaaatgtttatttaataatatttaacccttttctaacttttaatactttaaatgcttgatctaacattttttagtgcgtgcgacatcatcacctacgacatcgatagctttagataatgtaccgctttggaaatcaattttgtcttgtaagcctaaatgttttactatttctgcgcctttatctatcacaactgaaccatgtgcctcatcatttctcttttgttattgattcatcataatcattttatgttataagataattcatttaatatttgatagtgtgtcttttattaaaattacaatgagtgactactgagttttagtagaatttgttatactaaagttcataataattaggaagaagtggtcaatgtgtttgattggtttcaattagccagtgaaaaagaaaatagaatgattcaaatgcgtcgttatatgcatcaatatccagagccttcttttgaagaaacgtggacacataactacattctcaatcagttaagtcatttagactgtgagattgtgtcacctgtaggacgaaatggtatcaaggcaacttttaaagggaaagaaaatggtccaactattgcatttcgtgcagacttcgatgcattaccagtccaagaattaaacgacgttccatataaatctaaaaacgatggttttatgcatgcatgtggtcacgatggtcatactgctattttattaggtgttgctgaaattgttcatgaacatcgccacttattaaaaggaaatgttgtatttatttttcaatatggtgaagagattatgccaggtggctctcaagaaatgattgatgatggctgtttaaacgatgttgataaaatttatggtactcatctttggagtggttatcccactggtacaatttattcaagaccaggtgcaatcatggcttctccagatgaattctcgattaccattaaaggtaaaggaggacatggtgctaaacctcatgaaacaattgatccaattgtaattatggctgagtttatactaagtgctcaaaaaatcatttctcgtaccatcgatcctgtaaaagaagcagtattaacctttggtatggtacaagcaggttcttctgatagtgttattccagattcggcattttgcaaagggacggtacgtacatttgatacagaactacaagctcatattcaagagaaaatggataaattattacaaggtcttgcattagcgaatgatgtcacttataacatggagtatattagagggtatttaccagttcataatcatgaagaagcttatgaaacagttaaacaagcggcaaatgatttacatttacgttttaataaatcagaattgatgatgattggtgaagacttttcacactatctaaaagtccgacctggcgcatttttcttaactggatgtggcaatgctgataagggtattacagccccacatcacaatccgcattttgatattgatgaagcagcatttaaatatgctgcaagcgaatttcttaaaatcttagaacttgaaagcgttttttaattctttgttaaatatgtatcgtaaaccttagaatataaacgattgaaacagctcatagatagtatttatctatgggctgttttattaatattttttactaaataaaagtacagtgaacttaagtcttattttcaaataaaaaaagactcccaataagggagtcttttatatcaaataataaattattcgaagatttcagttacaacgcctgatcctacagtacgtccaccttcacggattgagaaacgagtaccgtcttcaatcgcgataggagcgattaattctactgtcatttcaacgttgtcgccaggcattaccatttcagtaccttctggtaagttaacaacaccagttacgtcagtagtacggaaatagaattgtggacgatagttagtgaagaatggagtatgacgtccaccttcatcttttgataaaacgtatacgtctgctttgaattttgtgtgaggtgtaattgaacctggagcagctaatacttgaccacgttgtacatcttcacgagcaacaccacgtaataaagcaccgatgttgtcaccagcttcagcgtagtctaataatttacggaacatttctacaccagtaacagttgttttagaagtttctttgataccaataatttcaacttcttcaccaactttgatttgaccacgttcaacacggcctgtagcaacagtaccacgaccagtgattgagaatacgtcctcaactggcatcatgaatggtttatcagagtcacgttctggagttggaatgtaatcatcaactgcttgcattaattctaagattttttcttcgtattgagcatcgccttctaaagcttttaaagctgaaccagcgattacaggtacgtcgtcacctgggaagtcgtattcagataataagtcacgtacttccatttcaactaattctaataattcttcatcgtcaaccatgtcaactttgtttaagaatactactaatgctggtacaccaacgttacgtgataaaagaatgtgttcacgagtttgtggcattggaccgtcagcagcagatactactaagataccaccgtccatttgagcagcaccagtgatcatatttttaacatagtcagcgtgtcctgggcagtcaacgtgagcatagtgacgtttgtcagtttgatattcgatgtgtgcagtattgattgtaataccacgttctttttcttctggagcgttgtcaatcatgtcatatgattgtgctacagtgtcaccatttttagctaatacagttgcgatagcagctgttaaagtagttttaccatggtcaacgtgaccgatagtaccaatattggcatgttcttttgagcgatcaaatttttcttttgccattattaaatctctcctattctagttaaagttatttcaatattatctctcatgatagttactcactatcatgagacataatgattgttctaaaaagaattcatagttcttttataatgcattttggataaaaaatcaattcataaagatgaatgcttaattaataagctcaagctgtattttacctagatttactagttaaaacaagttatattattcacctttattttttttgatgatttcttcagcaattgattttggaacttctgcataatggtcaaagtacatagtgtaagtaccgcgaccttgagtgttagaacgtaatgaagttgcataaccaaacatttctgaaagtggtacataagcgttaacaacttgtgcattaccacgtggttccataccatcaacacgtccacgacgagctgttacgtcacccatgatatcacccatgtattcttcaggcatttcgattgtaactttcatcattggttctaagataactggatcacattttttagcagcttctttaagtgctaatgatgcagcaattttgaaggccatttctgatgaatcgacatcatggtatgaaccatcaaataatttagctttaacatcaattaatggataaccagctaatacaccgttttccatagcatctttaagaccagcttcaactgatggaatgtattcacgaggaactacaccaccaacgatagcgttttcgaattcgaaacctgcgccagtttcatttggagtgaattcaatatgaacatcaccatattgtccacgaccacctgattgacgagagaatttaccttgaacttgagcagattgtttaaatgtttcacgatatgaaaccattggtgcacctacgttacattcaacgttgaattcttttttcatacggtctactaagatatctaagtgtaactcacccataccaccgatgataacttgtccagtttcttcgtcagtatgtgcatggaaagtagggtcttcttcttgtaatttaactaaagcttgagtcattttatcttggtcagctttagacttaggttctactgataagtgaataactggttctgggaattccattgattccaagataatgtcatttttctcaccacataaagtgtcaccagtacctgtttctttaagacctacagctgcagcgatatctcctgagtaaacagtgtcaatttcttgacgagagttcgcatgcatttgtaataaacgacctacacgttcacgtttatcttttgttgagtttttaacgtatgaaccagatgttaacgtacctgaatatacacggaagaaagttaatttaccaacataagggtcagtcataactttgaaagctaacgctgcgaattcagcattatcgtcagcttttgcaatgacttcttcatcaggattttcagcacgatgacctacgataggtttaacatctaatggtgatggtaagtaatcaattactgcattaagcattaattgaacacctttgtttttgaatgctgtaccacaaagtactgggtagaattctacgtcagtagttgcttgacggatagcattttttaattcagctactgaaatttcttcgtcaccaagatatttttccattaattcgtcgctagtttctgcaactgcttcgattaagttagaacgagcttcttctgctctttctttgtgatcttcaggaatttcaatttcttcaatttctgtacctaagtcatttgtatatttgaaacatttcatttcaactaagtcgatgattgcttcaaattcatcttcggcaccaattggtaattggataggtgctgcatttgcttgtaagcgatcatgtaatgtacttactgaatactcaaagtttgcaccaagtttatccattttgttaacaaatacaatacgaggaacaccataagtagtagcttgacgccaaacagtttcagtttgaggttctacacctgattgagcatcaagtacagtaaccgcaccgtcaagtacacgtaatgaacgttcaacttctacagtgaagtctacgtgtcctggtgtatcgataatgttaacacggtggtctttccaagaagctgttgttgcagctgatgtgattgtaataccacgatcttgttcttgttccatccagtccatttgtgaagcaccttcatgtgtttcaccaattttgtggatacgacctgtataataaagaatacgttcagtcgttgtagttttaccagcatcgatgtgagccatgataccgatattacgagtgtttttcaaagaaaattctctagccattgtttttctccttccagttattactgaataagtactatagaatatggcgatgccctaagcatgaaccattttacttggtaaaccaatatgacggaacacactcagggttaaagcttcaatcttaccaacgatagtgagcgaatgctttgttcgcttcagccattttgtgagtgtcctcacgttttttgactgcaccacctgtattattagcagcatctaagatttcgttagctaaacgatcttccatagttttttcaccacgaagacgagcgtagtttactaaccaacgtaatcctaaagttgtacgacgttctgggcgcacctcaacaggtacttggtagtttgaaccacctacacgacgcgcttttacttctaatactggcataatgttgttaatagcttcttcgaatacttctaaagcatcacgaccactgcgttgttctacaaggtcaaatgcagaataaagaattctttgtgctgttccgcgtttaccatctaacataattttgttaattaattttgtaactaacttagagttatgaattggatctggtaatacgtctcttttaggtactgatcctttacgaggcattataaagtcctcccttcctattataatatattcttaaaaattgatagtaaaatttacacaatcttaaacttaatttttaggttttttagttccgtataatgaacgtccttgtctacgtccatctacacctgaagtatcaagtgcaccacgtacaatatggtaacgcacaccaggtaagtcttttacacgtccaccacgtacaagtacaacactgtgttcttgtaagttatggccgataccaggaatgtatgcgttgatttcaatgttgtttgataaacgcacacgagcgtatttacgtaacgctgagttaggttttttaggtgtcattgtacctacacgagtacaaacaccacgtttttgaggtgagtttaagttagtaaattgtttctttttactattgaaacctctgtttaacgctggtgaatctgattttttagatttactttgtctaggtttacgtactaattgattaatagttggcattgaatgtcctcctctcttcattttttaattccacacatccaggtggttcatttttaggttaaataaaatttagtaagtgtaaaaacttactaattctcattcaataacgcaacaattgtcgcattaacattaatacctactgcttttcctaaagccgatttgctttcgaaataagtaatcggtatgcttttatgattgatttggctaaatacttgagctaataagtatatctcaacatctttagcaataatcaatgatgcaacttgatcttttttcaacgcttttaacgtttgtttaagaccaactacaaaatgttgtttgttaaagcgtgcaactttttcattagacattaaatatcctccaaagttctgcttgcatcaacctttacaataataacactttatataataattagtcaacattttttatcattttctgtaaatattaaaagaaaagaacttggaacaaattaaagttccaagttactttcacattaattactcagtcacttctgcttcgtcagcttcagcgactggagtactcactttatcgtatttaacgtcactataacgtctcatacctgtaccagctgggataagtttaccgataataacattctctttaagtccaagtaagtcatcgcgtttacctttaatagcagcatcagtaagtacacgagtagtttcttggaatgaagccgcagataagaagctttctgtttcaagagatgctttagtaataccaagtaatactggttttgcagtagctgggcgtttacgttctttaaacgcttctctatttgcatcagtaaagttatgaatatctactaatgaacctggtagaagtttagtgtcaccagcttcaataattcttactttacgtaacatttgtctaaccattacttcaacgtgtttatcatcaatttctacaccttgcatacgataaactttttgtacttctttaagtaagtagctttcagtcgcgtttaaaccagcaacagctaagaagttcttaggttcaatagaaccttcagttaatacttctccacgttctactgattggccaatttctactttaattcttgaagtacctgaagcaagataagatcgtgtttcattagcgcctttaattacaatttcttgttggcgatcttttgctaatttaatatcttcaacgacaccttcgatttcagtaattaccgcttgacctttagggttacgtgcttcaaagatctcttggatacgaggaagaccttgagtgatatcgcttcctgctaccccacctgtatggaaggtacgcattgtaagttgggtaccaggctcaccaattgattgagcggcaatagtaccaactgcttcacctacttcaactttttcacctgtagcaaggtttttaccgtaacatttttcacatacaccatgacgagtattacatgtaaatgctgaacggatatacattttttcaatacctgcatctgtaattttcttagcaatttcaggtgtgattaattcatcaggacgaataatgatttcatccgtttcaggatgacgaattgtttctttagaataacggccttcaatacgttcgataaatggttcaatcatttctgtaccttctttaatatcagaaactaataaaccacggtccgtaccacaatcttcttcacgaacgataacatcttgtgcaacatcaacaagacgacgagtaagataacctgaatcggctgttttaagtgctgtatcggcaagacctttacgcgcaccatgagttgagatgaagtattctaatactgttaaaccttcacggaatgatgaagtaattggtaattcaataattttacctgatggcgcagccattaatccacgcataccggctaattgtgtgaagttagatgcgttaccacgggcacctgagtcactcatcataaagattgggtttgttttttcaagtgattgcattaattcgccttgaatttgatctttagcatctgtccaaatttcaacaactgcattgtaacgttcatcttcagtgattaaaccacgattaaattgtttagatacacgttctactaatttttcgtgttcatctaaaatttgttgtttatctggaagtactacgatatcagatacaccaactgtaataccagctttagatgagaacttgaatcctaagtctttcatgcgatcaagcatcattgatgtatctgtgatgctaaatctgttaaatacttcagcaataatattacctaagaattttttgttgaaaggtgcagtaagttcttgctcttcgaagtaagctttaagaccaccttcacctaattgtgttggatcaacaaaatatttatcaggtgttttatcttctaagttttcttgagtaggctcattaatatatgcaaatgaatctggaatgatttcattaaagatcactttacctacagaagtagctaaaattttattattttgttcttctgtaaatgtagggttattaagtgaacgcgcatgtaaacctatacgagtgtgtagatgaacataaccatttgcatatgctttaagtacttcatttgtatcattaaagattataccagtatttacagcatctttacgttctaaagttaagtaatagttacctaataccatatcttgtgatggtgtaacaactggtttaccatctttagggttcaagatattttgtgccgctaacattaacatacgtgcttcagcttgtgcttctttagataatggtacgtgtaccgccatttggtcaccatcaaagtcagcgttataagctgttgttacaagtggatgtaaacggattgcacgcccttctactaaagtaggttcgaaagcttgaatacctaatctgtgaagcgttggcgcacggttaagtaatactgggtgttctttaatgacatcttctaatacatcccatacttcatcatccatgcgttcaattttacttttcgcatttttaatgtttgttgcgatttcacgttgaactaattctttcatgacgaaaggtttaaataattcaagtgccatttcttttggaagaccacattgatacatttttaagtttggtcctaccgcgataactgaacgacctgagtagtcaacacgtttaccaagtaagttttgacggaaacgaccttgtttaccttttaacatatgtgataaagatttcaatggtctattacctggaccagttactggacgaccacgacgaccattatcgattagtgcatctactgcttcttgtaacatacgtttttcgttttgaacgatgataccaggagcaccaagatctaataaacgtttcaaacgattattacggttaataacacgacgatataaatcatttaaatcacttgttgcaaaacgtccaccatctaattgaaccataggacgaatttctggtggaataattggtagtacatctaaaatcatccatgaaggattatttccagaatttctaaatgattccacaacttctaaacgtttaattgcacgtgttaatctttgtccagttgctgattctaattcatcacgtaatgcttttaattcttcatctaagtcaatttcttctaataggtctttaataccttctgcacccatttttgctacaaattgacctgggtatttatcataatattctctgaattcagcttcagataataatgattttttctctaatccagttggacctggatctacaaccacataagaagcaaaataaataacttcttctaatgatcttggagacatatctaataaaagacccatacgacttgggatacctttaaagtaccaaatgtgagaaacaggtgctgctaattcaatatgacccattctttcacgacgaactttagattttgtgacttctacaccacaacggtcacaaaccatgcctttgtagcgtacacgtttgtacttaccacaactacactcccagtcttttgtaggtccaaaaattctttcacagaaaagaccatctttctcaggtttcaaagtacgatagttaattgtttctggttttttcacttcaccatatgaccaagaacggattttttcaggtgaggctaaaccgattttcatataatggaaattatttacatcaatcaaggagcctacctccttcaatttagattagctgtgctatttgattgatttacatttactgaaactgacatcacatacataagatgcacatcagtgcgcaatctaaatcttgatgagattaaaattacgcaactcatgtttattcatcttaaatttataattttattattcgttagtttctttttgagtttctggaacatctttttgttgtaaatctactttgcgctcagttgcatcttcatcatcaacatcggccatttcgatttcattatcatgttcatccataacttttacatctaaacctaaactttgtaattctttcatcaatactcggaatgattcaggaacacttggtcttgaaatgttttcacctttaacgatagattcgtatgttttaacacgacctacagtatcgtcagatttataagttaagatttcttgtaatgtgtatgctgcaccataagcttcaagtgcccatacctccatctcaccgaaacgttgtccaccgaattgtgctttaccaccaagtggttgttgtgtaacaagtgagtaaggtccagttgaacgcgcatgcaatttatcgtcaaccatgtgagcaagtttaagcatatacattactccaacagaaatacgattatcgaatggttcaccagtacgtccatcatataatactgttttaccatcacgtgccataccagcctcttcgattgtagaccatacatcatcgtcgtttgcaccatcgaatactggagaagcaacatgaatacctaagtttttagcagccatacctaaatgtaactctaaaacttgtccaatgttcatacgtgatggtacacctagtgggtttaacatgatatcgattggacgtccatctggtaagtaaggcatatcttcttcaggaacaatcttagagataacccctttgttaccatgacgaccacacattttatccccaacatggattttacgtttttgaacgatatatacacgaacaagttggttcacacctggtgataaagtatcatcgccttcttcacgattaaatactttaacgtctagaacgataccacctgcaccatgtggcacacgtaatgaagtatcgcgaacttctcttgctttttcaccaaagatagcgtgtaataatcgttcttctgcagttaattctgtgacaccttttggcgttactttaccaactaagatatctccatctttaacttctgcaccgacgtatataataccacgatcgtctaagtttttaagtgcattttcagaaacgttaggaatatcacgtgtaatttcttcaggtcctaatttagtatcacgtgcttcagattcgtattcttcaatatgaattgaagtatatacatcgtctttaactaatcgttcactcatgataacggcatcctcatagttatatccgtcccaagtcatgaaacctacaacgacgttacgacctaatgccatttctcctaattccattgaaggaccatcagctaaaatttcattgtattctacaacgtcacctacagaaacgattggacgttggttataacaagtaccagagtttgaacgtttaaatttagctaatgggtaacggtctaattcgccttcatgttcagttccattttcctcaactaaacgacgaactaggatttcattagactcaacatgttcaacacgacctctatgttttgcagtaattgctgcaccagagtcacgagctgccacatgttccatacctgtacccacaaatggagcttcaggattcatcaatggtactgcttgacgttgcatgttcgcacccattaacgcacggttagagtcatcgttttcaaggaatgggatacaagctgtcgctgctgatactacttgtttaggtgatacatccatgtagtccattttttcttttgccataacagtattgttaccacggaaacgacataccacttcatcatctaggaaacgaccattttcatctaaacgagaattggcttgtgcaactacatagctatcttcttcatcagcagttaaataatcaatttgatcagtaattgaatttgtatcaatatctactttacgatatggtgtttcgataaaaccaaattcatttacacgtgcataactagataatgagttaattaaaccaatgtttggtccctctggtgtctcaattggacacatacgaccatagtgagaatagtgtacgtcacgaacttccatttgtgcacgttcacgtgttaaaccaccaggtcctaaagcagaaagacgacgtttatgtgttaactctgctaatgggttagcttggtccatgaattgagacaattgagaactaccaaagaattctttaattgaagcaattacaggtctaatattaattaattgttgtggtgtaattgaatcagtatcttgaatagacattctttcgcgaacgacacgttccattctagataaaccaattcggaattggttttgtaacagttcacctactgaacgtaaacgacgattacctaaatggtcaatatcatctgtataaccaataccattcaataagttaaagaaataactcattgaggcaataatatctgctggtgtaatacatttcacttctgaatcaggtaatgcattaccaatcactgttgtagtgcgttcttcttcatcatttggaacatacactttaattgattgaatttctacaggttcatcaataacgctaccttctaactcgaacacttcactgtttgcatttgactctaaaacattcataatttcgtctaatttacgacgatctaaaactgttccttcttcagcaacaatttcacctgtttcgctgtcaacgattggttcagctaatttttggttaaataaacgatgttttaggtgtaactttttatttgttttatagcgaccaacacttgctaaatcatagcgtttagggtcgaagaaacgtgaatataataagctttttgcgttttcaactgttggtggttcaccaggacgtaaacgttcatagatttctaataaagcttgttcagtattttcagtactatctttttcaagcgtattacgtaagtattcactatctcctaataaatcgataatttcttgatcactagagaatcctaaagcacgtaataatactgttaaaggtaatttacgtgttctatcaattcgaacgtaaacgatgtctttagcatctgtttcatattctaaccacgcaccacggtttggaataatcgttgcgtcgtaattttcacgtccattcttatctattttttcattaaaatatactgatggtgaacgtactaattgtgaaacgataacacgttctgcaccattaattacgaacgtaccagtatccgtcatcaatgggaagtcacccatgaaaacttcttgttctttaacttcaccagtttctttgataatgagacgtactttaacacgaagaggtgcagcataagtagcgtcacggttttttgattcttctaaatcatattttggttcacctaatctataatccacaaattctaaagataggtttccagtgaaatcttcaattggtgaaatatcacggaacatttctaataaaccttcttttaagaaccagtcataagatttagtttgaatttctattaagttaggtaattctaatacttctgaaattctcgcataatttctacgtttacgatgtcttccatattggacaacttgacctgccaaacagattcacccctcaaatattgtgttgaacttatacacaaaatttcacataacaagacaaaaagaaaacggcaacacaattgatgacaccattttcgattcttctcttattcttgtttatcgtgctcaatttgcgtaaaagtacacacttgttgaacataaatttttacattttataactatatcagaataccattttgaaatcaacctttttggctcttcaatatatagtaccctttacttttgttcacagtttctacattattaaatatttcttccattttctttttagcagaaggcataccttgctttttctgaatgacaacatagagttcaccttgattttttagcttttgatatgcttcttcaaagattcgatgaacaacatttttcccagctctaattggtggatttgttaatacaaagtcaaaatattcattctcaacttgtgacagaccatcactttctgtaatgatgacattatcaatttgattttgctttttgttcttttcagccaaatgtaatgctcgatgattcacatccaccatagtcatttgatggtgtggtgacactttagcaatcattaaaccaataggaccataaccacagccaacatcaatgatacgtttacttggacctggtggatgttcatttaaaaacgttcgtactaataaatcagacccaaaatctacttttccttttgaaaaaacgcccgcatctgtcgttagttttaactgagatttatgataaaagtattgaattgttttttcatcactttgtacttcaggattttcatcatagtagtgactcatgatttcacctctttatttgttcatctatttgattagaaaatgaattaaaaccccgttatcaacaataacggggttttaatttctcaaagaatgcaagtaatcattaacgctttcactctaaagtgactaagttaaaatgatttacttatatattaagttaagatactagaattattttaattctacagtagctccaacttcttctaattgttctttaagtttttcagcttcttctttagcaacagcttctttgattactttaggagcgttgtctactaattctttagcgtcttttaaacctaagccagttgcttctttaactgctttaacaactttgatttttgaagatccagctgaagttaattcaacgtcaaattcagttttttctgcgccagcgtctccgccaccagctgcaccagctgctgctacaggagctgctgctgttacaccaaattcttcttcaattgcttttactaaatcgtttaattctaatactgacatttctttaattgcttcaatgatttgttcttgattagccattttattattcctccatttattttaaaattttatgcgcaattattcagcgctttcttctttttgttctccaacagctttaaccgcataagcgaagttgcgtactggagcttgtaatactgataaaagcatagatacaagaccatcgtgtgaaggtaatgaaccaacagttttaacttcttctgctgagataacgttaccttccataacgcctgttttaatttctaaagcttcatgttctttagcaaatcctgagatcactttcgctggagcaactacatcatcagtagttgtagcgatagctgtaggaccagttaagaattcatctaagccttcgatacctgctttttcagctgcacgacgaactaatgtgtttttgtatactttatactcaacaccagcttcacgtaattgagcacgtaaatcagttacttccgcaacagttaaaccacggtagtccacaataacagttgaaactgaatttttaagttgttcagcgataacgtcaacttgttgttttttagcttcaataatagcagacattcagacacctccatttttatttttggtgcttttttaataaaaaaagcactttctacccacggcaaaaagtgcttgaaagatcattataataatcatcacgttcaagtcaattttagcctcggtaggatattgttttaagttaaaaattaactcctactgtcttaggtaaaataatcacaataaataatataacttgtttattgtgatatgtcaattgtttttttaaaaaaagactggaagaaaatgtatcttatctttttcaaaataagcaattattatctaccagtctataatctattaatatatttaaaattaaagtttaaatgctgaagtatctactttaactccaggacccattgttgtagttacagcaacagatttgaagtaagtacctttagcagatgctggtttagctttagctaaaacatcttgtaaagcattaaagttttcaactaatttttcttcgtcgaaagatactttaccaatcgtagcatgtacgatacctgctttttcagcacgatattcaactttaccagctttaatttcttctacagcttttttaacgtccatagttactgtaccagttttagggtttggcattaaacctttaggtcctaatacacgacctaatttaccaacttcacccatcatgtcaggtgtagctactactacgtcaaagtcgaaccaaccttgttggattctttgagcatattcagattcacctacgtaatctgcgcctgcttcttctgcttctgtaattttatcacctttagcgaaaactaatacacgttgtgatttaccagtaccgtttggtagcactactgcaccacggatttgttggtcatttttacgtgtatcaatacctaaacggaatgctacttcaactgatgcatcaaagttagcgatactagtttctttagctaatttaattgcttcttcaacactatagtatttagtacggtcaactttattagctgcttcttgatactttttaccttttttagccatttattattcctcctttagtggttttagcggaatttcctcccacgcttacttgtgtgatttacacaagttaagagcagataacagatgatgtcaataataaatattaatttactaaagactaatcatagacaatatatgttgtcgtttctgttacctgctatcgtctatcagtttatttcaaattcaaactaattttcatttaataattattgtacagtgatacccatactacgtgcagtaccttcgataatacgcatagctgcttcttcgtctgcagcgtttaagtcttgcatttttgtttgagcaatttcacgtacttgatctttagttactgtagcaactttagttttgtttggttcaccagaacctttttcaacgccagctgcttttttaagtagtactggagccggtggagttttagtaatgaatgtaaatgaacgatcttcatatacactgatttctaccggaatgattaaacctgcttgttcttgtgtacgtgcattgaattctttacagaatcccatgatgttcacacctgcttgacctaatgctggaccaactggtggtgctgggttcgctttacctgcaggaatttgtaatttaactactttttctacttttttagccacgatgtgcacctccttgatatcgtgatgtggtcacagggctcagttttgccctcccactcataaacatttcgtgacgaaatgagcgttctaaaaacgcgaccacattattttaacattaaacttaattaaaaatcaatagtaaaatttcatctttttaagcaaatcatactttataatttaaaatgattataatttttctatttgatcgaattctacttcaactggtgtttctctaccaaacatatcgactaatacagttaatttaaatttatctgcttcgatttcttgaacttcaccaacttgatttgcaaatggtcctgatttgatgcggacttgttcacctacatctaattctacatcaattgttttttctttaagtcccatttgttttaagataaatctcatttcttcaggaagtaatggattaggttttgaacctgcacctgctgaaccaacaaatcctgtgacacctggtgtattacgtacaacataccatgattcatctgtcataataagttctactaaaacatacccagggaatgtctttttaacttgtttttttgctttcccatctttaacttgtgtttcttcctcttcaggtatgacaactctaaaaatttgctctgtcatattcattgattctactcttttttctaaattctttttaactttattttcatatccagaatacgtatgcactgcgtaccaacgcttagtcccaacttcttcagacatgttgtcactccttactcttatctaaataattcaattaaattaccaatacctacgtctaatacccagaaaaagaccataaagaaaattactgtagctactacaatgacagtatatttaaaaagttcttctttcgtaggccaacttgttttttccatttcgcttttaacgccttggaagaaactttctttattcttacttgcgtctttatctttagccataaccttacctccatgctcttcaaagtatatacttataaactcattactttgattctttatgcatcgtgtgttcattacatctggaacaatatttcttcagttgtaatctcttagctgatgtttcttttttaggtacattataatttctgctaccacacatttcacaaactaaaggtacttttctcacatcaattcacctttgctcatattaataccagtatactatacataaacttataataaactgtcaaactcgtactaaaatacttaacatttgtattttaataaatattgtttcatttttattttacaacgttgaatactattgtaaactactttatcttttacatttagtcttttcgctatttctgatggggaataatcaagtagaagtaaatttgcaacttctctttcaaacatacttaacttcttaaaactatctatcaagtcttctttacttaatctagttaaatatagttcttccgtcctttttatcatttgattcaaacgatattctactacacattcattgattaacaattgttgacgttgattaaacgcataacgttttctccaaaaatctttttttacagaataaactaaacgatttaaataatgttcgaatggaacattcgtattaaaattaaatgtgtgtaaagctaaatatatctttaacgaggtatcttgaattaaatcttccagttcttgatgatctatacctagcattctaaacttcatcataagtttaggacgtatcacattcattatatttgcgaataactgttctttctccaatgtattttggctatattgaaaagctttaaatatatcttctagttgtcgaaaatgataagtcatatacaaaacctttctttataagttaggcacattgtataagacgcatcttttaaatatcaagactgtattatttatgttttttaccatatcctcgtcgtattttttcaaattctgcaagtacatcttttgataacgaaattcgagttcttggtttacgttcattaaaatcatctactgatttactaaccgtcattgcattctcttttaaatctcgccacatttctctagatgaaacacgatatgcacctgctccaaaaatagcatgttgctcgctcatatcgctagtcactactgtaatatgtgtcgtatgtttattgtataaattatatacataacgctcaatatagctatctgcagtttctttttctttcgtaaaaactgttttaacaccatgatacatgtattctctttctataccagattgttcatatgcatcaaatacacatacaatctcatcagcgacaactgcattgtaattggcaatcacatctaagagttgttcacgtgcttcctctaaactttctcttgctactttactcaattcccttgattgaccaatcatattgtaaccatcaataattagatatctatctttcattgggtgtctccaatttgatgtcgttttcgatagacttcatacatcattaaactagcagctacagaagcatttaagctattaacatggcctaccataggaattttaatatagaaatcacatttatctttaaccaatctactcataccttgcccttcactaccaattacgatagccaatggcatatcagcagccatattgcgataatctgtagcattatccgcttcagctcctgctacccaatatccattatctttcagctcatcaattatttttgataaatttgtaacacgcatcactgggacatgttgaatcgcacctgttgacgcttttgcgacagtttgtgtgagcgcaacagaacgtctcttagggataataactccatctactccacttgcatctgccgttctaatgatcgaaccaagattatgtgggtcttctaaaccatctaaaataattattgtagaaaggccttctttttctttttgagattgaataaactgatcaaaatctgcatattcgtatggtgcaatcagtgcagctacaccttgatgaggtgcatttgctaaattatctaatttggattttggaacagtttgtataatcaatttctgtgctttagcattttttaaaatatcattaatttgctgctttcttattccttcttgtatccaaattttatttattgtatgaccagacacaattgcttctttaacagcgtgtctaccgacaataacgatatcttccactatgttcactacctttcatcaacaatttgtacaatcgtatcaagtaacgcatctaatcgttcattttgatgatctaaataaagaaatcctataacagcttctaaacctgaacttttacgatacgtttgtacatctgtatttttagctttcgtataacttttagcgttacggcctcttctaacaatatctagttcttcttcagtaaaccattcttttgttattaatacctcgagcgtttgtgcttggctttttgcagacacatattgtttcgatacttggtgtaagcgattcggtttactctgtaatttaagcacaatgtattcacgtacatgctggtctaatacagcatctcccatataagctaacgttaatgggtttaatagctttgcatccatattaaccccttctaaatcttacaccttgaggcgtatcttcaagaataatattttgttcttttagcatatctctaatttcgtcagctcgagcaaaatctttatttttacgtgcttcattacgttcttcgataagtttttctatgtcttcatcaagtaatacatcattttcttttccttctaatggcacacctaatacgtcactaaaaatatgatatacttctttaaagcgctgaatcactttagtagatgttgtattttctaatacatatttattagctaatttcgataaatcataccatgcagttacagcatttgctgtattaaaatcatcatccattacagcttcaaattgttttaaaatatcattaatttgatcaatatagtctgtttgtgtttctaaatcagttgcgattgcttctctttctttaattaattgataactattacgtatacgctctaatccacttttagcagcattcactaattcaacgttatagttgattggacttctataatgaacactgatcatgaagaaacgtaatacatctggatcaatttctttaataatatcgtgtactaaaataaagttacctaatgatttactcattttttcattatctatattaatgaaaccattatgcatccaataattagcaaaaggcgcgtgattgtgtgcttcagattgcgctatttcattttcatgatgtggaaattgtaaatctgatcctcctgcatggatatcaattgtttttcccaattcatgataagccattacagagcattcaatatgccatcctggacgtccttgtccaaatgggctctcccaactaatttctccaggttttgcctttttccatagcgtaaagtccaatgcatcctctttttgttcacctgcttctatacgagcgccaacttttaaatcatcaatagactgatgacttaatttaccatatccatcaaatttacgggttctaaaatacacatctccattactttcatatgcataaccttcatctacaagttgtttaatgaagtcaatgatttcatccatatgattcattactcgcggattagatgtcgctcttttaacattaagtgcccctacatcttcatagaatgccttgatatatcgatcagcaatttctggcacactttcatttaattctttagaccgattaatgagtttatcatctacatcagtaaaattagatacgtaatcaaccgtatagcctttatattcaaaatatcgacgtaccacgtcataattaattgctggacgggcattaccaatatgaatgtaattatacactgtaggtccacatacatacatttttaccttaccaggctcaataggcttaaacacctctttttgacgtgttaaagtattatataatgtaatcatctttaatcactccattcttagctttttccaattgtcgttctagttgcttaatttgttcaaataaaggatcaggcaaattacgatgatcaaatgttttcccaattcgttttccttcttgtttaacaatatgacctggaatgcctacaactgttgtataacttggcacagattgtaagactactgaattcgcaccaatattaacattagaattaatttggatatttcctaaaacttttgatcctgctgcaattaaaacattatctccaatatctggatgacgctttcctttttgtttacctgtaccaccaagtgtcacgccttgataaatagttacgttatctccaatcgtacatgtttcaccaatgactacacccataccatgatcaataaatagacgttttccgatttttgctccaggatgaatttcaattcctgtaaaaaagcgagatacttgtgaaatcattctcgccaaaacgtagtgttttttattatataatttatgtgcaattaagtgactccataccgcatgcaagcctgcataagttgtgattacttcaaatgttgtacgtgctgcagggtcttgttcaaataccatttttacatcatctttcattctttttatcaagacgctcgcctccccattttctatatattatgaatatcttacagtccatgtataataattcaaatatttaaaaaaagcgcccctaacattaactgctagaggcgctattgcacggttccactcttcattttagataaagtaagttgatgaacatactagtctaccttatcatactcatttctatatttaattgaacattcaaaggtgcattcgatatagataatgatatgctcacagcaaccgcatactctctaacaacattatcgtatatttactaatcctttaactaacatatgtttaattttatcataagaagttttttataaaatttcaagtttaaacatgtgtgtctgacttattatattaacattgttttaaacatatttttttaaacgagatagtactttttcttttcctaatacttcaattgtattcggtaattcaggaccatgcatttgaccagtcactgctacacgaataggcataaataattgtttacctttaatacccgtttctttttgtacttctttaatcgtttttttaatttcagcagcttcaaatggttcaagcgcttctaatttaccatataaatgagacattaattcaggaacttgttcaccatttaatacctcttgttcttcttcacctaattcaggcatatcatggaagaacatttctgataacggaacaatttctcctgcataactcatttctttttgataaagaccaattaatttgcgtccccattctctatcttcttcacttggattttcaggaattaaatttgctttgatcaagtgtggtaaagcaagctcaaatactgtttctgtatcttttgttttcatatattggttgttaacccaagctaatttttgtctatcaaacattgctggagatttagaaagacgttgttcatcaaaaatcttaatgaattcttctttagaaaagatctcatcttcaccttcaggagaccaacctagtaaagcaataaaattgaataacgcttcaggtaaataacctaaatcacgatattgctcgataaattgtaaaatttggccatctcgtttacttaattttttacgttgttcatttacaattaatgacatatgcgcaaaacgtggtgattcccaaccaaatgcttcataaatcattaattgcttaggtgtatttgatacatgatcatctccacgaataacatcagaaatttccatatagtgatcatctactgctaccgcgaaattatacgtagggacgccatcttttttcacgataacccaatctccaatattattagagtcaaaagaaatttctcctttaaccatatcatcaaatgtatatgttttatcttttggaacacggaaacgaatagcgggtttgcgtccttcagcttcaaattgttgacgttgttcttcagttagatgtgcatgtttaccgccatatcgtggcatttctccacgagcaatttgagcttcacgttcttcttctaattcttcttcagtcatgtaacatttgtatgctttatcttcatctaataattgttgaataagtggattatagatgtctgcacgttcagactgacgataaggaccatgacctttgtctttatcgatagattcatcccaatctaagcctaaccattttaagttatcaaattgtgaagattctccatcttcaagatttcttttactatctgtatcttcaatacgtactacaaaatctccatcataatgtttagcaaataaataattaaataatgcagttcttgcatttccgatgtgtaaatatccagttggacttggcgcatatcttactcttacgcgttcactcattcgtttcactcctaattttgttattcattctttatagcgaatgatttctttcattagaaaaaagttatcccaaacaatctttaaagaatcgtttttgaataactttaacttctaatctatacttagatcaacttcgcatttccttattattgtagcattaattggctggtttgataagtctattgctgttgttgttacgttactcatcaatatctcatagcgaaaaatgttatacaataatttataaatgaatacgtttcacatgaaacccttttctctattcacttaaggactcctctatagtcttagcaaatataatacgaccagatgatgtttgtaataaactaatgacttctaattcaacctgtttacctataagagatttggcatgatctacaactaccattgttccatcatctagatatcctaccccttggccaggttctttacccattttagttaataaaatattaagtcggtcaccttgatgaacattgggtttaattgcttctgacaaatcattaacatttaatgcagtaatcccttgaacatgacataccttattcaagttgaaatcggttgtaatgacatgagcatgataaacttgagctaattcaactaacagtttgtcaatatcactatgagatttttgaggatgaatcacacgagttggatagtctaaatcataaagttgatttaaaatatctaatccacgttgtcctttttcacgtttgatactatcattagcatctgcaactacttgtaattcatttataactccttgaggaataagaatttctccatctataaatccgcatttaataatatctaaaattcttccatcaataattgcacttgtatctaacagtttaggtatggcgctgatattatttttagacattgaacgtgctatattttctggcaaaaacataagcatttcatcacgctttttcaaaccaaactggaatcctaaataacataataataatgtaataataataggcacaaggtgatttaatatagaatttcctatcatttctaaaataaatgaaaccattactgaaataaataaaccaacgactaatcctagtgtagcaaacaaaatttcaactgcactacgttgcataatccaaatttcagcttctttaagtaatcgtgttactttattaataaataacccaaatattagaaagaatacaatcatccctattaaaccatcaacataatgattagtataaatgggatggttgttcatacctaaatcatttaaaatttctggaattaacatgattccaaatgatgcaccaagaatgatgtagattataataataattccttttaataccttcatacgttatcacccctttaaatgcctatgatgagcgattactaaacgcatatgttaaggcatcatgtaccgttgtcacaccaacgacctgaacaccttctgggaatgtccatccacctatattcgtttggggaataatcactctcttaaatcctagttttgccgcttcttgtacacgttgctcgatacgcgatactcgtcttacctcaccagttaatcccacttcaccaatataacaatccaaaccatctacggctttatctttaaaacttgaagcagtcgctacaataatacttaaatctacagccggttcagtaagtctcactccacccgctactttaatgtaagcatcttgttgttgtaaaagataattttcttttttctctaaaacagccataagtaagctaagtcgattgtggtcgatgcctgtggccattcgtcttggattattaaatgtagtaggtgttactagagattgcacctcaatcaatagtggtcgtgtgccttccatagtagccacaattgttgatcctggaacatttgtagagcgttcttctaaaaacatttctgaagggttttgtacccctttcaaaccactttgtttcatttcaaaaatacccatttcatttgttgaaccaaaacgatttttaactgctcttagaattcgataagcatggtgttcatcaccttcgaagtataaaactgtatctaccatatgttctaatagtcttggaccagcaatttgcccttcttttgttacgtgacctactataaaagttgcgatattcatttgttttgcaatattcattaaactttgtgtactttctcgaacttgtgatactgagccaggtgctgaactaatctcaggatgataaatcgtttgaattgaatcgacaacaagtatgtctgggcgctcttgttccacggtttgatgaataacttctaaatctgtttcagctagtacatttaaattactagagtcttcctctagacgatctgcacgcaatttcgtttgatttagtgattcttcacccgtgatataaagtacattaagtttctgtgataacgatgcacaaatctgtaataataatgtagatttcccaatacccgggtcgccgccaatcagtacgagtgatccactaacaattccaccaccaagtacacgattaaattctttagagtccgtttgaactctcggtgttgcctcatgcttaatactatttaatttctgtacttttgcttgtgtctcttttgcttttacgccatgctttggattggaagtcttttcaataatttcctccatttgattccaagcaccacaattcggacattttcccatccatttaggagactgatatccacaagccatacattcgaaaattacttttttcttggccaaaactgcacctccgatttttttgaacatatctattttatatgtatccagttataatgacaaatttaaatatatatataaatgaaaagaagagtctaggatttaatgactcctagactctgaatttaagctctttttattcttctgttgctggttcttttgtatcttctatattattttcttgtttatcatggatatcatatttgaattcattaccatcatgatcaattgtgacttcttttccttcaatttgattaccatcaagtatcaattcacttaaattatcttcaactgttttttgaattgctctaattaatggacgagcaccgtattctggatcatatccttcttcggcaattttttctttagctttatcagtaactacaatattaatatcttgttctgataaacgttttgttaatttatttaccatcatagtcacaatttctttaagttcatcttttgttaatttatggaaaacaataatatcatctacacggtttaagaactcaggacggaatgaatttttaagttctttcatcatagttctacgaattgtttcataatcttgtccttcagatgcaccaccgaatccagcaaaacgttgatcttgtagttcttgtgctcctacatttgatgtcataataataacagtattacggaaatcaacttgacgcccttttgtatcagttagatgtccatcatcaagtacttgtaataagatattaaacacatctggatgcgctttttcaatttcatcaaataggataacagaatatggcttacgtctaactttttcagttaattgaccgccatcgtcatggcctacataacctggaggcgctccaactaaacgactcacagcatgtttctccataaattcactcatatcaacacgtatcattgcgtcttcttcaccaaacattgattcagctaatgcacgtgcaagttctgttttacctacaccagttggtcctaagaaaatgaaactaccgattggacgtttagggtcttttaggcctgcacgtgcacgacgaactgctttactaatagaagttacagcatcgttttgtccaattactcgatcatgtaatgtttcttctaaattaagcaaacgatctgactctgtttcattaattctagttaatggaatacctgtccatccagcaataacttcagcaatatcttctttagataatgacgttgattgtccaccttgagatgtcttccattcatttttagcatcttcatattgtttttcaagttttgattgtttatctcttaagttagctgcattttcaaattcttgtgcatggacggcagcatctttttcatttttaactttttcaatttcttgttcaatctcttttaaattatttggagttgtgtgactttttagtctcacttttgaacttgcttcgtcaatcaaatcaattgctttatctggtaggaaacgatcagaaacataacggttacttaatttagcagccgcttccagtgcttcatcagaaatattaatacgatgatgagcttcgtagcgatcacgtaaaccttttagaatagcaacagtatcttctacagaaggttcatcaacttgaataggttggaaacgacgttctaatgcagcatctttttcgatgtttttacgatattcatctaatgttgttgcacctatgcattgtaattcaccacgcgctaacgctggttttaaaatattagatgcatcaattgcaccttctgcaccaccagcaccaactagtgtatgcaattcatcaatgaataaaatgacattacctgcatgatggatttcatccatgacttttttcaaacgttcttcgaattcaccacgatatttagtacctgccacgactgttcccatatctagtgacattacacgtttattttttagcgtttctggcacttcattatttacaatagcttgtgcaagaccttcagcaatggctgttttacctacacctggttcaccaataagtacagggttatttttagttctacgacttaatacttcaataacacgtgtaatttctttatctctacccacaactggatctaacgtaccgtctttagcaataactgttaagtctcgtgctagtccatccaatgtaggagtgttgtttgatttatttgcagttgcatttttagtattcatttcaggactacctaatgctttcactacttgtgcacgtgctttagtaatattcaaatctaagttagcaaatacacgtgctgctactccttcattttcacgaattaaacctaataaaatatgttctgtacctacaaaattatgatgcaattttcttgcctcatccattgatagttcaatgacttttttagctcttggggtatagtgcaacgtacctgaatgttcttgaccatgaccgattaatttttcaacttcttcaataactttatcttcagtaatattaaaactttcaagtactttagcagcaataccttctggttctttcattaatccaagtagtaagtgctcagtaccaatgttcgaatgatttaaacgaattgcttcttcttgtgcatgtgctaatacacgttgtgcgcgttcagttaatctaccaaataacatatcgtttacaacctcctaatttgtatgttttcttaatatatttgcccgtttttcatttacagatacgttttcatcttcatcattatataaaaacgcagattggatacttaccattaattcattaaacttaaagttacttaaatttaaatatcctaaatctatgcctaacttaatttcacttaatctatatgacgcttcttccattgatatcatacggctattttgtaatattcctaacgaacgataaatacggtcaagcgtttctaattcactatattgtgttaaacgttcacgaatttgcatttcttcattaataatttgttgaactacttctgtcagctggtcaataatatcttcttctgtcttacctaatgtaagttgatttgaaatttgataaatatgaccataaacttgtgaaccctctccatatatacctcgaatcgtaaatccaaaacgattaattgtttgtgcaatacgattcatacgtttcattatagataatccaggtaaatgaagcatcacacttgctcgcattccagtcccaatatttgtaggacaagtagttaaataacctaaatcttcatcgaaactaatttctaattgttcatcaagaatatcatcaatttctgaagccttttgatataaatctgtcagagataaatcattacccattgcttgaattcgtatatgatcttcttcattaatcataatacttaaagattcatcgtcatttaataacaccgctgaagctggttgtttaatcaattctttactaatgagatgtttagccactaacttcatcttactttgttggtccatggtatctaaacgcattaaagataaattaggtagtgcatcttgcacttcattgattactctaaaacctgcttgttcagatggaaacattaaaggatgaacatgattttctaaattacgtgctaaacgaatacgcgaagacattacaatgggagattcatctgtttctttcatccattcactaatatgtgcatccatatcattcatcatgctccatctcgctttcatgtttcaaggctttaatttcatctctaatgacagctgcttcttcaaatttttgcttttcaattaatatatttaagtaattcgttttttcttcaatttgtttttttattgccagtttatgatgtgaagaacgaggcatcttgcctacatgttcaaattgtccaccttgtactcgtcttacaatatcaacaatatcctctttaaatactgcatagcaatttgcacatccaaatttacctacatgagctatatctttcaatgtcatattacatgtaggacatcgtttttcttcttgaaatgctacttcatgaaaatttaatccgtgtttagttgctaaatgttgtaagatttgtttgactacaaaggcttcttcaatatcatcttgaaactctgaatgtgacgcagcatgttcttgttgattccaaggttgctctccttgcgcacattctgaacacacccacttttcagaggtaccatctttactttttactgtgagtttaacctctgcttcatttaaatgacaattttcgcaaagcacacatagacacctcgcatttctttattatttattaatagtaattaatgataggtaataatcgtttgagaatatttgctctaataatatctctagaaacaacatccattgatagtgtttcacgatcaataatcacttgaatcattcttgcttctctatcactaattaatcctttatctaacaaaccatcaattatataatatgcttgctgttgagatatagaaggaccaattaattgcaatagatgattaatataacccgttgcatctttattttcaattttcgtgattcggatatatcctcctccaccacgtttactttctatttcataaccatgttcatttgtaaatctcgttttaataacatagttgagttgagaaggcacacaatcgaaacgttgagcaatattagctctttgaatttctaccatatcttcattactttcttcaaataattgtttaatgtattgttctatgatgtcagacatgttgtgcatgatttaccaccccttttgaccttctttgactatattatatgaccaactttgacctttttcaaccaatttgttttttttatttaaaaatattaatgttacttctattattttattgtattatataagataaagagaattttaaaggagtagaatcatgcatattcttattgggatcattgggattattgtctttttagcgctggcatttttatttagttcagataaaaagaatgttcgttggcactatgttggattattattaattattcaacttatattcgcatttattcttttgaaaacgactgctggtattacaattatcggtggtatttcaaatggatttaactatttgttacaaaaagctgctgaaggggttaattttgtttttggaggatttaaatttgtagatccaaaaaatccaccattcttctttagtgtcttattaccaatcgtatttatttcggcattaattggtattttacaatatactagaattcttccatggattattaatgtgttagggttcttaatctctaaaattaatggtatggggcgtttagaatcatataatgcagtagcagctgcgattcttggccaatctgaagtatttatttcattaaaacaacaattaccatatatacctaaacaacgtttatatactttaactgcttctgcaatgtctactgtatctgcatctattatcggtgcatattttacattgattgaacctaaatacgttgttacagcggttgtattaaacttatttggtggcttcattattgcttctattattaacccttatacagttaatgaagaagatgataaattgctagtggatgaatcagaaactaaaaaacaatcattttttgaaatgttaggtgaatatattttagatggtttcaaagtagcagttatcgttggtgcaatgttaattggctacattgcaatcattgctttattaaatggccttgtaagtggtatttttagtttaatttctggcggagcaatcaaatgggatttccaaacgttaattggttttgtgtttgcgccatttgctttcttagcaggtgttccttggcaggatgcagttaaatcaggttctgtgatggcaacaaaattattatctaatgaatttgttgctatgcaatcacttggaagcttgaagggtatttctgaacatgcaaaaggtattacgtctgtatttctagtttcatttgctaactttagttctattggtatcatttctggtgcgattaaatcacttaactctgaaaaaggtgatgtcgtagcacgttttggtattaagttattattcggtgcaacacttgtatcatttatttcagctgctatcgctggattcttcatttaataagaaaaagcttgagactttaatctcaagctttttttatttaactatatgttcaataaaatactgagttatacgatagtcatctgttaattctggatggaaagacacccctaggtatttcccttgcttaacagctactattttatcactaatagaacttaatatttctacattattttctacactaacaatatgtggtgctcttataaagacaccttctatatcttttgcaatacctttaacatctaactcagcttcaaaactatctacttgtctaccaaaggaattacgcgcaacagtaatatctaatttttttagatatcctgtctcaccttctacatcttttgcaagcacaataagacctgcgcaagttccaaacattggtaaatcagattgttgtaatttttctttaaagccatataaatccataagtcttcttaaagttgtagattcaccaccagggagaataagaccatcaatttcatctaattgttcaactttcttaactgctataccttcgtgaccacttaattcaatgtgacgaatatgttcacgtactgcaccttgtaacgctaatacaccaatcttcataaattaccaaccacgctcttgcatacgttcttctaatgagattttatttatatctaaacctttcattgcagttcctaattcagctgctaattttccaattaattcataatcttgataatgagttgtagcttgaacaatagcttttgcaaatttttctggagcttcagatttaaaaatacctgaacccacaaataccccatcagcacctaattccatcattaaggcagcatcttgaggtgttgctacaccacccgctgcaaagtttactactggtaaacgaccttcttctttaatttgttttaatacattatatggtgcacctaattctttggcataagtcataatttcatcgtcattcattacagttagacgactaacctcagaattaacttttctcatgtgacgtacagcttctacaatattacctgttccaggttctcctttagtacgtaacatcgctgcaccttcgccaatacgtcgtgctgcttcacctaaattacggcaaccacaaacaaatggtacagtaaattgatcttttcttaaatgaaattcttcatctgcaggagtaagaacttcagattcatcaatatagtctacacccatagcttctaatacacgtgcttctgtaatatgaccaatacgtgctttagccattactggaattgaaacagcattcattacttcttcaacaattttaggattggcactacgtgctacaccaccagctgctctaatatcagatggtacgcgttctaaggccataactgctactgctccagcttcctctgcgattctagcttgttcagcattcacaacatccataatgacgccgcctttttgcatttcagccataccgcgtttaactctttcagatcctacaattttagacatttataaaaccccttttcaattgattaaatccattttaaaatataaactgatgtttaaaaaggtacaattttaataaaaaattaggggtcagatttatgacgaagaaaaaatcattatatatttctttatatgaaaagctaaaaaaacaaattattgaaggtgtatatgaatcaaacgataaatttccatctaaaagacagttgagtcaacatttatcacttagtcatactacaattgagcatgcctatcagttacttttagatgaaggatttatatactcaaaaccacgttcaggttattatgtttcagaaattcaatcattgccagtaacaaatagttaccctgaaataagtgatatattagaaactgataagactacacagaaaaatacgtatcagtatcaattcaatttagctgaaattgatgctgaacattttcctaaccatttatttaaaagatatgctaaagaagtatttgaagaagagcaacttgcccttttgagtaaaggaagcgttcagggagaatttaacttaagacagcaaatttctcattatttatttaatagtagaggagtatcttgtcatccagatcaaatcataattggctcttcaactgaacaattattaaatatggtcactgatttattaaaagattcatcatttattatagaacaacctagttatccaccaattaaacatgtactggataagcatagaataagttatacacaagctagagtagaaaaagatggaattaatatcgatgaagtcttccaaaaaaataatgatattttatatatcacaccatctcatcaatttccaacaggatatgtgatgagtttaaagaagcgcacacaacttataaaatgggcacaacaaaagaaagaacgatatattattgaagatgattatgattcagaatttagatatttcggaaaacctattccagcattacagaatttagataaaaaacaaaaagtaatatatattagtacattttcgaaatcgctttatccaagttgtcgtatggcatacattgtcttaccaaataaactgctaaaattattccgagagatgaaatacgttgaaagcaatactgtgcctgtacatctacaacatatggtagcacaatttatggcaactggtagctttgaacgtcatcttaataaaatgagaagaatatataaaaataaattaacttttattttagaaaaactaacaccatataaaggacaattgaaaattgaaggcgcactaacaggaatgcacttcacacttgtagttaaaaataatttaacattaaatgaatgcataaaaagaacgaaaaaatgcaatcttaaattaacgccttatccttatagcaacaaaaaagcacaacctcctaccttcttaattggctttggaggtatcccagaagaaaaattagagaagcatgttaatgcgcttattaaagcacttactgtttaaatagaagaaataagttctgactcattttggattggtagtcattgaacgtgaacttttttaagaaagtcactatgctagcaatccttagtgtatattcatttagtcatcttttaattagttatatatagatatatattttaaaataaaaaaagagacctcacggtctcaatatcagctcatcgcatccatacaatgatttgcctggcaacgtcctactctagcggaacgtcagtccaactaccatcggcgctaaggagcttaacttctgtgttcggcatgggaacaggtgtgacctccttgccattgtcaccagacaaatgaatgataagaaaagtaacagctcaacgagctgaaaataatcaaaaaaattataaaaaagacaatttctatattatttcaatagaaattgtcttttttcacttatctagatactttatgtcccggactctttttaaattttaatacttaaaaagtggaaatatgttatgataattaaaagaaagtgattataaatattggaggtaatcaagtcttgttacatatgcatattgtgagttgggttttaaccattgtgttatatattattgcatttttacacatttcaaaatcacaggggccaacaccaacttttaaatcattacatatggggcttagagtctttatgctccttacaatattctcaggattttgggaattaattgaagagtttatggcagcgagtcatggtgaaggtggcaaccacatgcttcttactttaaaaatgttatgtggcttaggtgttgttgctttaatggaagtatcattagctaaaagaaaaaaacatgcacctagtcatggcttattttgggcaacaattattttaattattattactatggctcttggaattatcttaccatggggtccattatctaaaatgttcggtttaagttaagtaaaaagaatcgtttgagtgtctactcaaacgattctttttatatattgcgtgctttgtaaccaatcatattgattaaatctttaggatgactataaggaggcgcataggcaacttcaaattcagccaattcatctactgtaagttgattcatcatagccattgataaaatatcaatacgtttatcggcgccttgttttccaactgctgcggcgcgtattaattgtctattgtctttattaaaatagacacgtaagtgtaggggtgtattacctgggtaatatcctgcgtgtgcaccagacttaatttcaaccatctcataattaaatagacttaattcttcaggttttattcctacactcgcaaaagtgtagtcaaaaaattttacaatatttgaaccaagaaaacctttaaatgtaatatgtttattacctgagagttgttctgctataatacttgctgcacgatgagcaccccaagctaaaggtacttgagcattcatatttacatggcgataatgtgaggtgatgacatcacctagagcataaatatcaggtatatttgttttaaagcaatcatcaacaggaataaaaccttgtttatctatatgaatatttgatgaacgtaaaaatgatgaattaggatgagttcctataccttcaataatgatatcgaaatcttcatgtataccagatttaaaataaacagtatgcgcttgaattgattcaatttcttcatttaatctatatgaaatgtttctttgatcaatttcgctaaaaatggctgcattcatatcttggtccattaatttattgactttatctgaacgatgaatccatgtcacatcaagaccacgttgataaaggttttctaatacttctaatgaaatgtaaccagcaccgacaactaatgctcgcttagctttatgacgagaaatatattgatcgatttggtccatatcttctgcatttcttagagtgaaagtaaaatcattagtaaatccaagagtattcgcactagcgccaggacttaagattaatttgtcataagtttcgtcgaatgtttcgcctgtttgatgatttaatacacgtacgacatgttgttgatcgtttacttcaattacttcatgatgtgttttaactacaatatttttcttctctttaaaaatgtctggtgtaataggcaatatttgatgacgatcagaaacgagatgtccaatatagtaaggtaaaccacaattagcaaaactcatatctcgatctttttcaaaaatgataatgtcgctttctttatctaagcgacgaatttgacttgcacatgttgcgcctccagcaacagcaccaactataataattttagccatacatatcctccataactaagaagtaaacaagtgagatacaattataatttttagaatcttactttaagtactctcatttttattatcgataaggtatttctagtttgaaaaattcatttaggtaacgcccaattccatcttcgttattggaataagtgatatgattagcgatatgttttaaatcatctaaaccattgtccatagcaattccgtattgagcatatttaatcatttctaaatcattatcttcatctccaaatgcaataatattagaagaatctatatttaaatatgatttaacatagtcaatgccacgagctttactaatacctcgttttacgatttcaataacaggaaaaggtgcaccccaacgacgatgttcaatattttcagcataaaaacgagttaacatttgtttaatacgtgtgatattcacttcttcagcttccactaatatggaagttggagattcattaagtttttctaataaattgcctgtttggattttaggattgcccattgaaaaaccttcaaataatcgaggatcatggtcattgataaagacactgtctctcacttcagcaataatgtttgtaacattagctttttgaagtgcctctatcatacttctagcgatatctacatctaatacctcatgtttggtttcaaagtcatctgcttttggatgatgaacataggcaccattaaaattaacaataggtgtattcatgttaagttcatgataatatatttggcttgcacgataaggacgtccagttgcaatcatcaagtaatgaccttgtttttgtaaggaagttaaaactttttttgtataatcactaatttctttattatcatttaataatgttccatctaaatctaaacaaattaaataaggtttcataaatatctccttgcattacagttcataaatattagtttatttgtatcatagcattttattggcgttttgtcggatatttgatatattagtgtaaagataattattgagaggtgatactaatggaagaagcattaaaagatagtatccttggcgctttggaaatggtaattgaccctgaattaggtatagacattgttaatttaggtttagtatataaagtaaatgttgatgatgaaggattatgtactgtagaaatgacacttacatctatgggctgtccacttggaccacaaatcatcgatcaaattaagacagtattagccgaaattccagagattcaagatacagaagttaatattgtttggaatccgccatggaataaagatatgatgtctagatatgcaaaaatcgcattaggcgttggataaatttaagtgagctcaacagcattaattgtatgaagctctttattatgaagagcttcatacaatatttaatagagagtaggggatgaatttttctcctactctcttttttaatatataagaatgtgacaattttatttttaaatgagtaaaaaagaaatgacacaattgtaatataaattgaatttacttctaggttatactacaatacataagacttatatcttaagaaaagtataattttcaacaattaagaattaatcaatgaaaatgaatttatattttatttaattgtatatcaaattttcagtcaacttagtataaaacacagaatcatattatacagtatattaaattcatagactatagaatgaccaatcatacatacaaatttctataattaactttattgttattctgattttagtgcttttatatctaatgaatttattgaaaatttattatttaatagggaaagaatgtgaacaatgaaacaaaatttagaaaagggcgttcatgataaaataaaaatgcgctatatgcctggtttagatggtctaagagcaattgccgtattaggcatcattatatatcatttgaatagaaagtggctaactggaggttttattggcgtagatactttcttcgtcatttcaggatacttaattacaagtttacttttgagagagtatgaagaaaaaggaattattaatcttaaacaattttggattagacgcataaaacgtctactgccagcggtgatagctttattaataacagtaggtattgcgaccttattatttgaacctcaacaaattattagagttaaacatgatattattgcggcgttattttatgtttcaaattggtggtatatcgctaaagatgttaactattttgaacaattttcattcatgcctcttaaacatttatggtctcttgctatcgaagaacaattttatttatttttcccattcgttttagtgatattattacttacgattaaaaaatatcgtaatgtgacacttatattttggatagtatcattggcctctttattagaaatggtcattatatcacaaccaaatgtgggatattcacgtgtttattttggtacagatactcgtttacaaacattattattaggcgtcatattagcatttgtttggccaccatttaaattaaaagctaatccaccacaacgattacgtcgtgcaatagatggtattggtataggtagcctacttatcttaattattttattctttacagttaatgacgatagtgattggatatacaatggtgggttttatttgatatctttagtgacattatttgttattgcaagtgtcgttcacccatctacaatgattgctaaattcttaggacatcctttgttagtgtatatcggaaaacgttcatatagtttatacttatggcatttcgccgtcattagttttctacatatacattttgttgatggtcagttaccaatatatgtatatatcttagatatactattaactgtggtgtttgcggaattatcttatcgttatattgaaacaccatttagacgtgaaggattaagtgcattttcttttgaccgattacgtaaacctaaatttataagaacaatcgttactatcatagctgtgattccattgttattaatatttatgggtgcatttgatcgatttggaaaagatgaaattgcaaataaagcaaacagttttaatacaagtactgctgataaatatttagtcaaaatgatgcccggtgaaaatattaagttaaatggacaaacaagtaagagtgagaataaagataaagtttacacaaatatcagcccattacttattggcgattcagttatggtagatattggagaagaatttaaatctcaagttcctaaagcaactatagatggtaaagtaggtcgtcatttacaagaagccctgatagttgcaaataattatactaattataataaaccatcaaatcaagttgtattagaacttggtacaaatggagattttactcaagatgagcttgatcaacttattagtaaatttggtaaagctaaaatatatttagttaatacaagggtaccgagaagctggcaagataatgtaaataaacaactttcagacgcagctaagcgacataaaaatgttgttttagtagactggtataaacgttctgccggtcacactgaatattttgcatctgatggtgtgcacttagaacatagtggggtacaagcattatcggatgaaatactaaaaaatatgactaaaaaataaataattaaaaaggattaactagttgaggatgctcacaaagttaatccttttttagcatttaagaaaaaattaaggtaacaatgtttaaatagtaaggtaatatgataagtaatgaatgaaacgtaaatgaatgcttgatatgataggatttattgaattgttaaaaagatgagtaaaagtgttgattaattagtaaagaaggtctataatgtaattaaggtcaaagaaagtcaaagtcaaacgaagaagtatttgaccatactcttatacaaaaagtaggggtgaatacatttggatatcaatcaaatgacttataaagtacaagaagctttgcaaaaagcaattgaattaagtaaagaaaatgaattacaaaatattgaaattgaagcaatactaaaaggaactttagaagaagacgaaagcttgtttaaaagtattttagaacgtgcaaatatagacactgatcaattaaatcaagcgtatagtgaaaaattaaaacactatccatcagtacaaggtgataatgttcaatatggacaatatattggctcaaaagcaaacgaattattaaataaagctgagtcatatatgaaagaatatgaagatgaatatatctcaatggaacatattttacgtgctgctatggacattgatgaaacaacacaacaatttgtaggaaataaagaagaagtagtcaaagaaattattactaaagttagagggggaaatcatgtgacttcacaaaatccagaagtaaattatgaagctttagagaaatatggtagagatttagtagaagaagttcgccaaggcaaaatggatccagttattggtagagatgaagaaatccgtaataccattcgaattttaagccgtaaaactaaaaataacccagtattaattggagagcctggtgtaggtaaaactgcaattgtagaaggattagcacaacgtattgtacgtaaagatgtgccggaatcattgctagataaaactatttttgaattagatttaagtgcattagttgcaggtgcaaaatttagaggcgaatttgaagaacgtcttaaagcagtacttaaagaagtgaaagaatcagatggacgtattatcctatttatcgatgaaattcacatgttagttggtgctggtaaaacagatggtgcaatggatgctggtaatatgttaaaaccaatgttagctcgtggtgaattgcattgtatcggtgctacaacattaaatgaatatagagaatatattgaaaaagattcagccttagaacgtcgattccaaaaagtaggtgtaagtgaacctgacgtagaagatacaatttcaatcttacgtggtttaaaagaacgctatgaagtttatcatggtgtgcgtattcaagaccgtgctttagtagcagcagcagaattatcagatcgttatattactgatcgatttttaccagataaagcaattgatttagtcgaccaagcttgtgcaactatccgaacagaaatgggatcaaatccaactgaattagaccaagttaatcgccgtgttatgcaattagaaattgaagaaagtgcattaaaaaatgaatcagataatgcaagtaaacatcgattagaagaattacaagaagaactttcaaatgaaaaagaaaaacaagcgtcattacaatctcgtgtagaacaagaaaaagaaaaaatcgcgaaagttcaagaaaaacgtgctgaattagatcgtagtcgtcaagttttagaagatgcgcaaacagaaagtaattatgaaaaagcagcagaattacaatatggtacgattccacaattagaaaaagaattaaaagaatacgaagaagctttccatgatgaacaaggcgataatgaacgcatgattcgcgaagttgtttctgatgaggaaattggagatattgtaagccaatggacaggtattccagtttctaaattagtcgaaacagaaagagaaaaattattaaacttaagtgatatcttacatgaacgtgtcgtagggcaagataaagcggttgatcttgtgtcagatgctgtagtgagagcgcgtgcaggtataaaagatcctaatcgtccaataggtagtttcttattcttaggtccaactggtgtaggtaaaacagagttagctaaatcactcgcttcatcattattcgactctgaaaaacatatgattctgacatgagtgaatatatggaaaaacattctgtttctagattaattggtgcgcctcctggttatgtaggccatgatgaaggtggtcaattaactgaagcggtaagacgtaacccatattcagttattctactcgacgaggttgaaaaagcacatagtgatgtattcaacgtgttacttcaaattttagatgaagggcgtttaactgattctaaaggtcgtagcgtagatttcaaaaatacaattattatcatgacaagtaatattggttcacaaatattattagaaaatgttaaagattctggtgaaattactgaaagcactgaaaaagcagttatggatagtttacatgcattctttaaaccagaaatcttaaaccgtatggatgatattgtattatttaaaccattatctataaatgatatgagtatgattgtagataaaattttaactcaattaaatattcgattaatggatcaacgtatttcaattgaagtatcagacgaagctaaaaaatggttaggtgaagaagcatacgaaccacaatttggtgctagaccacttaaacgttttgtacaacgtcaaattgaaacaccacttgctcgtatgatgattaaagaaaatatgccagaaggtacaaaagtaaatgttgatcttaacgatagtcaagaattaacatttgatgtacaaaaaccttcagctgaatagtatataaaaaggcattggaaagcaaagctttccaatgccttttcttattattaaacttgttaagagcgttatattactccaaacacgtaatacaataccatttagacgtctctattccctttacgagcgaaatcattaggtttaatcatagcacctaaaatggcaatagcaatggtaatgatgattgcaataataattggtttaatcacatctaaactgccgccaccatttaaactattaagtacaaagttaaccatttgtgttaagattaacgcccaaataaaagttacgaggtatttcatatatatgacctccaatttatatatattatcattttaaagtaaagtgaattatttgtatagtattagtagagaatgtataaaaatttgtgccattttttatatgaattattggctcgtgactgtttaacaaaatcgtctaatcaagtgtaactacttgagttagatttaaaaagtatgttaaattaatacctggtattaaaaaatgaagtgagaaggtgtacgttcatgaacgtaggtataaaaggttttggtgcttatgcacctgagagagtagtcgataacgcctattttgaaggttttttagatacgtctgatgaatggatttcaaaaatgactggcattaaagaaagacgttggtctcgtgacgaccaagatacgtcagacttagcatatgaagcaagtaagaaagcaattgaagatgctggtattaaaccgaatgatatagatatgattattgtagctacagcaactggagatatgccatttccatctgtagctaatatactacaagaaaaattaggtactggtaaagtgcctactatggatcaacttgctgcatgctcaggtttcatgtattcaatgattactgcaaaacaatatgttcaatctggagactataaaaatattttagtagtgggtgcggataaattatccaaaatcactgacttaactgatcgttcaactgctgtactatttggagacggtgcaggtgcagtagtaattggtgaagtctcagaaggacgaggtattattagctatgaaatgggctcagatgggtcaggtggaaaatatttatatttaaataaagagactggtaaactagtaatgaatggacgcgaagtttttaaattcgctgtaagaattatgggcgaagcgtctacacgtgtagttgaaaaagcgggtttagaatctgatgatattgatatgtttataccacatcaagcaaatatcagaattatggaatcagcacgtgaaagattgggtattgaaagagaaaaaatgagtgtttcagttaaccgttttggaaacacgtcagctgcttcgattcctttaagtattcaacaagagttagaaaacggaagaattaaagatgatgacactttagtactcgtaggtttcggtggcggcctaacctggggcgctatggtaatcaaatggggtaaataggaggatttaatgtatgactgaaaacaaaagagtggtaattactggtatgggtgcattatcacctattggaaacgatgcccaaacaaattgggaaaatgccttaaaaggtgtcaatggaattgatacaattacacgcgttgatactgaagaatataacgttcacttagcaggtgaattaaaagactttaatattgaagatcatatttcgaaaaaagatgcgcgtcgcatggatcgttttacacaatatgcagtagtagcggcaagacaagctgtagaagatgctaatttaactatcaatgatgataatgctaatcgtatcggtgtttggattggttcaggtattgggggaatggaaacatttgaagttgcacatacaatactgaagaataagggaccaagaagagttagtcctttctttgttccaatgcttatccctgacatggctactgggcaagtttcaattgatttaggtgcaaaaggacctaatggttcaactgttactgcttgcgcaacaggtacaaattctatcggtgaagcatttaaaatcattcaaagaggtgctgctgatgctatgattactggtggtactgaagcacctattacgcatatggcacttgcaggattcagtgcaagtcgtgcattatcaacaaacgatgataaagaaacagcatgtcgtcctttccaagaaggacgtgacggatttatcatgggtgaaggcgctggtatcttagtcattgaatcattagaatcagcacaagcacgtggcgcacaaatttacgctgaaattgtaggatatggttcaactggagatgcttatcacattactgcaccagcacctgaaggcgaaggtggttctcgtgcaatgcaagcggctttagatgatgcaggtattgaagctaaagatattcaatacttaaatgcacatggtacaagtacgccagtaggtgacttgtatgaaattaaagcgattaaaaatacatttggagatgcagctaaaaacttaaaaattagctcaactaaatcgatgacaggacatttattaggtgctactgggggaattgaagcaattttctctgcattatctattcgtgactctaaagttgcaccgacggttcatgcagattcaccagatccagaatgtgacttagatattgttccaaatgaagcacaagatttagaaattgaatatgcaatgagtaatagtctaggtttcggtgggcataacgcagtattagtatttaaaaagtttaaagattaaaaattaagttaagagtagaaaaccatgcaataagatgcatggttttcttatattatagaaaaagtgaaatgagaatagtcagaatgaagtaaaatgcacatagtattagagcaggtagtaaccatgttgaaatggtataatgctctttttttacttgttttggattgaaaaagtcatcgttctctaaagtttttttcttagagcgagaagcgagttgataacgcatgcgtctaaaaccaaaacttgtagcatcaaatataccttcttgtacaaggagaattaaaaataacaatataaataatacaagtgatatataaaataagatattaataaatgagacaaacgaatgttgagttacgaacatccaaagtaaaaaagtacatatgagtggcaaaaagagccatataaaccaagttttaatattgttcatgtatacctccgacttttttatctatatagtctaatttactgtaaatttactataaataaaatctaaaatttatattcttttaaataatatatataaaaattacacttatattaagaaaatgtaaaattatattgcaattttatgaaaatagtatatataatatgtataaatatttctgaaaattttgaagggaatgttaattttgaatatttagtaaagggggactatatgatgacgcgatatatattaaaacgtttgggatatatggttttatcgttatttattatcatcacaattacatttttcttaatgaaaatgatgcctggatcaccatttaatgatgctaaattaagtgctgagcaaaaagcaattttaaacgaaaaatatggattaaatgatccagtagcagtgcaatatcttcattatttaaaaaatgtagtaactggagattttggctattcgttccaatatcataatcaaccagtttggtcattaattagaccgagattgattccttctatggaaatgggtattactgcaatgattattggagtgattttaggtttaattttaggtgtagctgctgctacgaaacaaaacacttgggtagactatacaactactgttatttcagttatagcagtatcagtaccttcattcgtcttagcagtactattacaatacgtttttgcagtacgtttaagatggtttccagtggcaggatgggaaggattttcaacagcagtattgccttccttagcattatcagcaagtgtaatggccacagtagctcgttatattcgagctgaaatgatagaggtactaagttctgattacatattattagcaagagctaaaggtaactcgccgataagagttctttttggacatgcattaagaaatgcattaattcctattattacaattattgttccaatgttagccggtattttaacagggactttaactattgaaaatatctttggtgtacctggtttaggggaccaattcgttagatcgattacaacaaatgatttctcagttattatggctactacaattttatttagtacattatttatcgtttcaatttttatcgtagatattctttatggtgtaattgatccaagaatccgtgtacaaggaggtaaaaaataatgcctgaaaattttaataaaccatttgatgaccattcaaatgcagcgatgtcacatacctctgagggagcggttgggacggattttgttattagagaactcgatttaaataaagaaccagaaatacaacgtgaaagtaaaaacttctggcaagatgcttggacacagttgaaaagaaataaactagctattgtcggtttgattggactcattttaattgtcattcttgcatttttaggaccagcatttagtaaacatgattatgctgaacaagatgttactagacgaaatttacctgctaaaattccagtactagatcaagtacactttttaccttttgatggaacaggggcagatggtaagagcgcttataaagaagcgggcgtgaaagaaaatttttggtttggtacagaccaattaggtcgtgatctttggactagaacatggaaaggtgctcaaatttcattatttattggcattgtagctgctgcactagatatctttataggagtcgtttatggtgctatttcaggattttttgggggacgtgttgataatgtgatgcaacgtattttagaaattatagcatctattcctaaccttattattgttattttatttgtattgatatttgaaccatctatttggacgattattttagctatgtctatcaccggatggttaggtatgagtagagtagtgcgtggtgaatttttaaaactaaaaagtcaagaatttgtaatggcttcaagaacattaggggcttcaaaatttaaattaatttttaaacatattttaccgaatacactaggtgccattgtagtaacatctatgtttactgtaccaagtgcaattttcttcgaagcatttttaagctttattggtataggggtgcctgcaccgaaaacatcacttggttcactcgtaaatgatggacgagcaatgttgttaatacacccacacgaattatttattccagctacagtattaagtttattaattttattcttttacttatttagtgacggattacgcgatgcatttgatccaaaaatgcgtaaataacaaaggaggcaaaatctatgtcagaaagagtgttagaagtcaacaacttgcatgtttcctttgatattactgctggggaagtgcaagcggttagaggagtagatttctttttaaataaaggggaaacattagcgattgtcggagaatcaggttctggcaaatctgtaacaacaaaagcaattacaaaattgtttcagggtgatacagggagaattaaaaaagggacaattaattttttaggggaagatttagcaattaaatctgaaaaagaattaaacaaacttcgtggtaaagatatttctatgatatttcaagatcctatgacgtcattaaatcctacgatgcaaattggtaagcaagtcatggaacctttaataaaacatcgtcattatagtaaatctgaagcaaaaaaacgtgcacttgagattttaaatttagtaggactgcctaatgcagaaaaaagatttaaagcatatcctcatcaattctctgggggtcaacgtcaaagaattgttattgcaactgcattggcgtgcgaacctaaaattttaattgcagatgaaccaacgacagcacttgatgtaacaatgcaagcacagattttagatttaatgaaagaattacaacaaaaaattgaaacatctattatttttattacacatgacttaggggtagtagcaaatgtggctgatagagtggctgttatgtatggagggcaaatgattgagactggaaatgtcgatgaaatcttctatgatccaaaacatccatatacatggggattattatcttcaatgcctgatttaacgacaagtaacgagacagagttaattgcaattccaggtactccgcctgatttattacatccaccaaagggtgatgcatttgcaagacgtagtcaatatgcactagacattgactttaaagaagttccaccatggtttaaaatatcacctactcattatgtaaaatcatggttattagacgaacgcgctccaaaagttgaaccgccagagatggtacaaaagagacaacgtcaaatgcctaataattacgacaagccacgtcgagtagaaagggtgtcgttcaatggagaagagtaaagaagtattattagaaataaaaaatttgaagcagtattttaatgaaggcaaacgtaatgaagttagagcaatagaaaatatttcatttaatatttataaaggggaaacattgggattagtaggagaatctggatgtggaaagtctacgactggaaaagcgattattaaattaaatgatattactgatggtgaaattctttatgaaggacaggatattcagaagattactaaaagaaaagacttattaaaatttaataagaaaattcaaatgatttttcaagatccatatgcttctttaaatcctcgtttaaaagtcatggatattgtagcagaaggtattgatattcataagttagcaagtaataaaaaagatcgtaaacgtcgtgtatatgatttgctagaaacagtaggtttaagtaaggaacatgcgaatcgttaccctcatgagttctctggtggacaacgtcaacgtataggaattgctcgtgctttagctgtagaacctgagtttattattgcagatgagccaatttctgcattagatgtttctattcaagctcaagtagtgaatttaatgctgaaattacaaaaagaacgaggtattactttcttatttattgcccatgatttatcaatggtcaaatatatttctgatcgtatagcagtaatgcattttggaaaaattgtagaattaggatcgtctgacgaaatttattatcatcctttacatgattatactaaatcactattatctgctatccctcaacctgatcctgatagtgaaagaacaagaaaacgaattgtgtatgaagaagatgaatctaaaaatgcagaacgtagactgcaagaaattagacctaatcattacgtttttgtaacagatgaagaagcagtacgtttaaaagaacacgatcaaactcatcttcaacataattaagtctgaggaagggaggacaacattaagatgaaaaagataaattttaaagtgattttaggattaatcgtgacaactttgctacttagtgcatgtgggaaaagtggcggattatatgatgatagcggtcagacttatcgagtagcaacgtcatcagatatgaatactctggataccgttttggcaactgataccgtttcttttacaatttataatcaagttttcgaaggattatatacattaaatggaaaagatgaagcaattccaggaatagctaaaggtgatccaaaagaatctaataatggaaaaacattaacgattaaattacgtaaaaatgcaaaatggtcaaatggagatccagttacagcacatgattttgtatttgcttggagaaaagctgtagatccaaaaacggcttcagaatatgcatacataatgtatgatattaaaaatgcagaagatattaatttaggtaaacatggaaaaaaaccaaaggatctaggtattaaagccttagatgattacacattaaaaattgatcttactaaacctattccatattttaaacaaatgctagcatttggtacatttatgccacaaaatgaaaaagcagttaaaaaatatggtgataaatatggaacaactgctgaaaaagtagtatataatggtccgtttaaagtgagtaaatgggcagtagaagataaaattatgctgaccaaaaatgataattattgggataaaaaggctgttaaattagatagagtaaattataaaattttaaaagatactcaagctggggcatcactatatgataccaattcggtagatagtgcaggtatcacgtctgaacaagtcgataaatataaagatgatccaggtctattcaaacgattaatagcatctactttcttcttgaaaatgaatgaaaaacagcaaccagagttcaaaaatagagatatgcgtttagcaatcgcacaatctgtaaataaaagagattatgttaatgaagttctaggaacaggtgctaaaccttttgatggtttcactgcacgagatactgttaaaacacctgaaggaaaagattatgcgagtactgttaaatcacctttaaaatttaatcctaaagaagccaaacaacatctgaataaggcgaaaaaagctttaggaaaagataaattcacttttactttaaatactgaagatacaccagattcaaaaatttctgcagaatttattaaatctcaaattgaatctaatttaccaggtgtaacagttaaaattaaacaattaccattcaaacaaagagtagaagcagagttatcaatgaattattcaatgtcattatcaggttggggtcctgactatccagatccaactacatttttagatacaatgactactggcaatgcccaaaataatactggatggggaagtaaagagtacgataatttattaaaaaaagcgaatggagaattattgcaaaaacctaaagaacgttttgcgacgatgagacaagctgaggagctatttttaaacgatgcacccgtagctccaatttatcaaaaaggaacagctacattaagaaatccacaagtaaaaggtatagaatatcatcaaataggtggagattattcacttaaacatgtatatatcgataaatcaattgatcgtgaaacaggaaaaaagaaagataactaaaataagaccacgagtattttacttatactcgtggtcttatttataatgatttatctcttacgtcctaagcccattgcacgttccatttttttcagtgttttaaaagaagctttttgagctttgtcacgcccttgatctaagatgtcatccaatctatctgaattataaaattcgttatatttttcttggaaatgtactaaaaagtctttaactacttctgataagtctgttttgaatgttccgtatccttcattctcgtattgtgtttcaagctctttaatagatttattagttaaacttgaataaattgtaagtaggttagaaattcctggtttattgtctttatcaaacttgataataccatctgaatcagttacagcgcttttaatttttttcgctgcaacatttggttcgtcaagtaatgagataaagtttttttgattatcatcacttttactcattttctttgttggatcctgtaaactcattacacgtccaccaacttttggcatacgaatttctggtttaactaatatatcgttataacgactattaaaacgttctactaaatttctagtaagttccatatgttgtttttggtcttcacctacgggcacaatatttgtattataaataacaatatcagctgccattaaaggtggataagttaataaaccagctggaataccatctgtacgtttttgcgctttatctttatattgcgtcatacgttcaagctcgccaacacttgaaatggtcgttaacatccaaccggcttgaacatgtgctggaacttctgattgaataaataatgttgatttatctggatcaatacctgaagctaaataaattgctgctaactgacgaatttgtttacgcaatttgattttatcttgtgggacagtaatcgcatgttggtctacaatacaaaagtaacagttgtaatcgttctgtacgtctgcaaattgttttaatgcaccaatatagttacctaatgtaggtatcccacttggctgtattcctgaaaataatgtctccatatagatgcctactttctttaaaaataattcattttaactagattataacagtatttttttaaattgtaagttatgttataatagagatacacatgagaaattagattttgtagagaaatttttagaaaatttgaaatttctcagaaaaattaggattttctcatttaattttaatgttagcatattatacttataatataagcttaagacaaattagcataattattaatataatgaataatatttattcaataggagagtgagatgtatggtaacattatttacatcaccaagttgcacatcttgccgtaaagcgaaagcatggttacaagaacatgacattccgtatacggagcgtaacattttttctgaacatttaacaattgatgaaattaaacaaattttaaaaatgactgaagatggaacagatgaaattatttcaactcgttctaaaacttatcaaaaattaaacgtagatattgattctttaccattgcaagatttatatacaattattcaagataatcctggactattacgtcgtccaattattttagacgaaaaacgcttgcaagttggatataacgaagatgaaatcagacgtttcttacctagaaaggttcgtactttccaattacaagaagctcaacgtttagtcgattaatatttaaaatttaacaacatattatttaacagcactggcttagctatagtgctgttttttataataaaaaaagggaatataatatgatatagtgtcctatttaaaatagtgaaatttaatcaaacaaataaattgtaatttaacttacgttctaatacaatatggttactattcatcgactgtaaggagtgagatgatatgagaatagaacgcgttgacgacacaactgtgaaattatttataacttatggtgatattgaagcaagaggatttagtcgtgaagatttatggacaaatcgtaagcgtggtgaagaattcttttggtcaatgatggacgagattaatgaagaagaagattttgtggttgaaggacctctttggattcaagtacatgcatttgaaaaaggtgtggaagtcacaatctctaaatctaaaaatgaagaagcaatgaacatgtcagatgatcatgcaaatgagcaatttgaggaacaagtgaatgaattgctagctaatacattagaacaagaagaaagtattgaagatttatttgaacaacgtgcacaacaaaaacaagcacataaatctaaacgtaaatcatcacaacaacgttctagtttaagaacaattattgtgaaattcgaagacttagaagaagtcattcattacgcttatcatcataatctatctacagatgagtttgaagatttattgtatatgagtgattcacattactactatgcaattcacttcgatagtactgttagccaagagacaattaatgatagctatagtcaattacttgaattcgcttatcctagtgataagacagaagtgtatttaaatgattatgctaaaattattatgagtcataatgttacttcacaagtacgtcgttattttactgattcagtagaataatatataacgattaatcgagagtagagaagaaatttaaaatgaatttcttttctactctctttttttaaagtaaatgaatcaccttaaacgtttaatagtatgaggtgaatgcatgttagtagcgattaatcgtaataatgaaaccgtatatgctcatcaagccatcattactgaagcataccgatgtccatattgcaaagaaaaacttcttttaaaaaaagggttaaaaaagattccgcattttgctcatgtttctcaaactaaaagaagatgtatgaaaaatgaaacagaaaaacattactacgttaaattttttattgctcaacgtctaaaacaatatcactttaatgttgaaatagagccttatttttctgaaattatgcagtatcctgatattcttgtgaatgcaaaagtagctatagaagttcaattttcaagaataagtataaaagaggtcaaatctcgatcaagaggacttgaacaaattggagtagcagttatttggattatcgaacaagtacaatatcataagggttatttatacttgaacacatttcaagcttatttcattaatccgattgatagaacactatatagttgggagcatgaaaaacaacttatagtaaaatatgtcaatatacaacatattggtggccgaaaatttattgcgcatagacgaatgattcaaatttctgaattgttatcattcaatgaacaaaagaatgagtcatattgttataaattgtcaaatagacatatcagtcgttatatttttaattgtagaaaaaaacgttcagtgctagaaccgtctttaagtgctatgtatcaattacaaataactgacgatgaggtatgtagagatacaggttatattttttcgtatcaaatttttattgaaaatcatccagtacaatggcaactcaagctgaagttgttgttaaaacataatcttcccaagcagtatttaatgtcctatttgaaattcagacaattttatctactggatattaataaagaagaaattactttaaagttaatagatgattatattcaacaaataagcgggagtttaaacgtgcaaaataaataaaagaatgagaaaattataacattaattcatttaggaggtacatgtatgagtcaacaacttactagagaagagcaagaacgaaaatatccaaatgaaacttgggatttaacaactatttttgaaagcgatgaagcttttgaaaaggcattaaaagaggtagagagctatctaggtaaagaagaacaatttaaaggacatctaggagatagtgctaaaactttatataatgctttagctttagaagatgagattggaacacaattagaaaaggtatatgtttatgcacatctaaaacaagaccaagatacatctaacgataaatatactggttttgaatctcgtgcgcatcaactcatcataaaaattagctcagcatggagtttcttagttccagagattttgcaaattgatgaagagaaattagaatcttttattaagagtaacgatgatttaaaacgttatgcatttgacttgaaattaattaatgaaaaacgtccgcatattttagatgctgataaagaaaaattattaacccaagcgcaagatgcattatcaactccagaaaatgtctatggtatgtttagtaacgctgatttagagtttaaagatgcagtagataaagatgggaaaaaacatcctttaacacaaggtacatttattaaatatttagaatcagatgatcgtaaattacgtcagtcagcttacaacaacttatatgaggcgtatggtgcatataacaatacattaggttcaactttagctggtgaagttaagaaaaatattttcaatgcgcgtgcgcataactataaaacggcacgtgaacgcgctttaagtaataatcatattcctgaagaagtatatgataatttagttgcaacagttcacaaatatcttccattgttgcataaatacactcaattgagaaaagaacttttaggtattgatgatttgaaaatgtatgacatctatactccattagttaaagatgttaaatttgaaatgccatatgacgaagctaaagaatggatgctaaaagccctagaaccaatgggaaaagaatatttagatgtagtgaaagaaggtttaaatcatcgttgggtagatgtttatgagaataaaggaaaacgctcaggtggttattcttcaggcgcacatttaactaatccatttattttattaaattggtctgatactatctctgatttatatacacttgttcatgaatttggacattctgcacatagttactttagtcgtaaaaatcaaccatcaaactctagtgattattctatctttgtagctgaagttgcttcaacatgtaatgaagctctactaagtgattatatggataaacatttagatgatgatcgacgtttattattactaaaccaagaacttgagcgtttcagagcaacattattccgtcaaactatgtttgctgaatttgaacacaaaattcatcaaattgaggaagcgggagaaccattaacttcaacacgtatgaatgaagagtatgctaaattaaatagactatacttcggtgatgtagtagaaacagatgatcatattagtaaagagtggtctcgtattccacacttctatatgaattattatgtataccaatatgcaactggatacagtgcagctcaaagtttaagtcatcaaattttaacagaaggacagcctgctgttgaaagatatataaatgaattcttgaaaaaaggtagttctaattacccaattgaaattcttaagaatgcgggtgtagatatgactacaccagaacctatagagcaagcgtgtgaagtctttgaacaaaaattagaagcatttgaaaaattaatgaagcactaaaaagagtgtattcgttttcaatgtgtctaatttgtgacatttagggtggaaatgtagtttaatattgaaacgacgttttgagcgtgttatattatatacatgaaattaatcacataacaaacatacccctttgtttgaagtgaaaaatttctcccatcccctttgtttagcgtcgtgtaatcagacacggcgttttttttatgcttaattattaaatcaagttaatataaaaagagcgatacacttcatataagtgatcgctctttgttatttcttaggcattttagattgccaaaattcgccgtcaggataatttagtttttcaactttttgttgtaaagctaattttttcaattcttttacgagtaatttttccggccattcataaatagtaagcaattcttccatcgttactaattgtttggattgaatataagtttcgagatttggaggtaattctttttcgatagggcatcccattaattcattaataatataagtataaatatgataaggataaaggccttcgactttcaaaccttcttcatgtacatcttcactaaaaaatacaagtgaaggcgcttgttcaatttccatttctcttgcaatatgcaaatctattttcaaactttcggtaagtttatttttttgtaagtcttctttgaaaacatcataatctaaaccagcatttttaatacaattacaaatcatttcttcagtgataatatcttttttcggtataatttcgttttgcattaaatgaataaaacgttccgctcttaatctaccttgtaattcagcagctttatatgctaaagcaatattatcaaaatctgaagtactttgagcttgacatttagtcaagacctttaatgaaggattcaaaatatgtctgattcgaatatattgattatactcaattcttaatttagaaataattgcggataatttaaaacaatctttattaaaaggatcaaagaatgaataaatttctattttatttacaggtgacagattagtgttttcacgactcgcattatctacaattttaagttcttcagccatgtttaactcaccttcaattatatttaggaattcaccatatggttagcagttaaacgcaatctttcatacaagtattcgccaactcctgctggaaattgagctttattgattgctttatacatattttctaaccatgcatctctttcataagtagtaattctaaattccatatgtcttttttttaacattgggtgaccatgttcttgagtgtataaatcaggacctcctagaaattgtgttaagaactgcttttgctttctacttgtttctttaaaatctccaggaaataaatggttgattctttgatcattctctacaagaaagtagaaataatcaatcatatcatacaaagctttttctcctattacatcataaggtgttgtagccatagtatcaccaatttctattaatatatttctaatataacatgaatttttacatttaaaagtaatttgacttttcacaagtttatctcatatctatcctaattgagcttgatattcaaaaaagcgttgaactttatttttagggggctcatgaactaggtcaaattgttttaataaattttgaaatttttcaaagcctatttgataatcattgacttcaaattctagttcatagtctgttttatcaaagtattgacttttatctaatactaatagttcattttgaaattcaacttctaatctttcagttgtcaatgcacctaaaacacttaattcgttttcttcaatatcaaattcagtaagaattttttgaatatcgttaggtaatgttgatttgacaattgtttgtccaatatgaggcttaatatcgattggatgattatattctatcaagccaactttagctggtacttttagtgtgatttcaaatgtgttttgtttaacacgtattcttaaagcagaacgatgatcacgtagtttgaaactaggtgattcaatataataatttgtttgagtgaatggtgtgagttgtttaaagtaagaatctttaatcgcgttatatgtattgaaatcaattaattgcttaaattcaatttcattattagtactcataattacacctcattagaaaatctttagtatattattgtagttcattatgacggacatttgtaaaaaattaaagtaataacaatactaaaaataaaatatatggagctaaatatttaatcgtttagagcatacttgaactatggtactctaatgtgtgtttgaaagttaaattatgttaaactaataaggaataataaggaggaacaagcatgcgtatatatgtaaatgaaattaaaatcaaagatgatagcatttattgctactcagaagatccaactgatggattagatgaagtaggacaaatgcttgtagatagtgataattttagttttgcttatttattagatgatggctcgtcgtattcatatttgatttttgtacaagagacgtggtcaatgttacataataatagagataaaaaagtaattattaacgatgaattagaattagaacattttcaagatgaattaagttatatcctagaaaatgttgaaggaaataataactatggtaaggagtttgtttcagcagttgaagaaactttcgaactaaagtgaaacggagtggaaccatatgaatcaatgggagcaatttttaacaccatataaacaagcagtcgatgaattaaaggtgaaattaaaaggcttacgtaagcaatatgaagttggagacaacgcctcacccattgaatttgtaactggtcgtgtaaagcctattacaagtatcattgataaagcgaataaaaggggaattccttttgatcgattacgtgaagaaatgtacgacatagctggtttaaggatgatgtgtcaattcgttgatgatattgatgtagttgttaacatgcttagacaacgacaagattttaaagttgtagaagaaagagattatattaacaatacaaaacaaagtggttatcgttcatatcatgtaattatcgagtatccaattgaaacattaagtggtcaaaaaatgatattagctgaaattcaaattcgaacattagcaatgaatttttgggctacaatcgaacatacattaagatataaatatgatggagattatcctgctgagatacaacatcgtctagaaagagctgctgaagcggcttacttattagatgaagagatgtctgaaattaaagaggaaatacaagaagctcaaaaatattatactcaaaaacgtgcaaaaaaacatgactgatgaggtgtcaatacatgcgttatacgattttatctaaaggtgactctaaatcaaacacgcttaaacataaaatgatgaatcaaatgaactcttttcatatgatggaggatacagaaaatccagaaatagtaatatctgtcggtggagatggaacacttttgcaagcttttcatcagtatagtcatatgttatcaaatgtagcatttgttggagtacatactggtcatttaggtttttatgcagactggttacctcatgaagttgaaaaattgattgatgaaattcatcattctgaatttcaagtgattgaatatccattacttgaaattattgttaaatataacaacactaagaatgaaacacactatctagcactcaatgaagcaactatgaaaactgaaaatggatcaacattagtagcagatgtcgcaattagaggtaaacattttgaacgatttagaggagatggtctatgtatttccacgccttctgggtcgacggcttataataaagcactaggtggtgcactgattcatccttctcttgaagccatacaaattgctgaaattgcatctattaataatagagtatttagaacggtaggttcaccattagtattacctaagcatcatacatgtttgattacacctgtaaatcataatacaattagaacaacaattgaccatgtcagtctaaaacataaaaatgtgagcgacattcaatttagagtcgcaaatgaaaaagttcgttttgctaggtttagaccatttcctttttggaaaagagttcatgattcgtttattgaaagtgaagatgattgatgaaatttgtataccatattcatagcgaagaaatgcttaagacatttttacaacgtcataattattcaaagaaaacaattagcgccattaaacgtgatggcgctttaattattaataggcaacctgtgacagttagatatatgttgaaaaaagatgatcaacttattgttaaactgccggaagaagttccaagtacatatcttcgtccttcaaacaaacatattgaaatattatatgaagatacatatttaattatcgtttcaaaaccggtgcatttaaattgtgcaccttcaagagaacatcctcatgatagtttaattgagcgcgtgatgtattatttaaatcattctacaaataaagtacaatatgtagtacctcatattgttacaagattagatcgtaatacgacgggcatcgttatctttactaaacatggtcatattcatcaccttatgtcgacatttgaaatagataagcgatatatatgtgtgtgttacggtaaaactaaagaacaatctatgatagaggcacctattggtagaaacaaagatagtattattactcggtgtattacgccatctggtaaacatgcaaaaactgaatataaaacgttgagtagtcatcacagtgcaagtttatgtgaagttaaattacatactggacgaacacaccaaattagagttcattttaagcatattggtcatccacttattggggatgacttatatgatggttttcatcctcgaattcaaacacaatctttacagtgttataaagtaaaatttagacatccaatatataataaagaaatcgagattattttagactataaaaacttagaaaaaatatatcaaagtgtaaattaaaattaggaggtacatttgatgtcattaaatacagaaacaactgacatacaacataataaagtatacaatcaaaaactactagatgacagtttaaaccgcaatgatatagatcaattcagaaaagaatttctaactatacatcaatatgaacaaagtgaatattttgaaaatacaacgaatcagaatagacaaagaatattcgaatttttatcgcctcaagaagtgagtagattttttaatcaattagatattgaggggaaagaatatgaaatattatttgattcaatgcatgcacattatgcaagtgaagtattagaaaatatgtctacagataacgcagttgatattctaaatgaattatctaactcaaaagttgccagtttattagctttgatggataacagagtcacagataaaatcaaaaagttattacattatgaagaagatactgctggcggtatcatgactactgaatatatttcattggatattggtacatctgtaaaagaggcactcatgctagttaaaagtcaagcacctgacgcagaaacgatatatgtgatttatgtcgttgatactgccggtcaactcgtaggtgttctatctttgaaagatttaattgtagcaaatattgatgctcatgttgaagaagtaatgattcgacgtgttgtaagtgtaaatgtagaagaagatcaagaacgtgttgctcaaaaaatgaaagattatgactttattgctatgcctgtgatcgactatcaacatcatttagtagggattatcacaatagatgatattttagatgttgtaaatgaagaagcagatgaagattattcacgtttagcgggggtttctgatactaagtctactgatcaatcagtatttaagaaagcattgaagagattaccgtggcttattattttaacatttttaggtatgataacagcaacgattctgggtggttttgaagataccttgtcgcaagttgcattattagcagcatttatccctattataagtgggatgtcaggaaattcaggaacacaatcattagcagtgtctgttcgtaatatttctaatggtgatattaaagaaaaaagtaaacttaaaatagctttaaaagaagcaggtagtgggttaatcactggttttgtatgtgcagtgattttattcttaattattgtcattatttatcgtcaaccattcttggcactgattgtaggtgcaagtttaactattgccatgacagtaggtacgttagtaggatcaatgattccaatcttaatgaataaaattcatatcgatcctgctgtcgcaagtggaccatttattacaactatcaatgatattgtaagtatgttaatttattttggacttgcaacaacatttatgtcatatctaacatagggggatgaaatggaatttttttctttggtcatagtcgtcgtcgcagcatttcttacaccgattattgttaatcgattaaacgtcacttttttacctgttgtcgtagctgaaatattaatgggaattattataggaaattcatttttaggacttgtccacaaagatgaaatgttaaatattctgtcaacattaggttttatctttttaatgtttttaagtggattggaaattgatttcagcgcatttaaaaaagacacaagaaagagacagggtattgataaaaatgaaaagaatttaccaagtcatttacaattagcacttacagttttttcattaataatggtgctttcaatcattttagcatttgcatttaaatggttaggctttgtagatgatgtattattaatggtcattattatttcaactatttcattgggtgtagttgtgccaacacttaaagaaatgaatatcatgcgcacaacaataggacaatttatattattagtagcagtattagcagatttatttacgatggttttattaactatttatggtggaatcaatggtgaaggcggagggtcaatttggctatctgcaattttaatcgtgtttactgcaatattttatttgttaggttctgtatttaaacggttaaattttatgcaacgcttaatgggtggtacaacacaaattggtatacgggccatttttgcattaatcattttactggttgctcttgctgagggtgttggtgctgaatatatattaggtgcttttttagctggtgtagttgtatcactgctaaaacctgatgaagaaatcattcatactttagattcatttggatacggattctttataccgatattctttattatggtcggtgtagatttagatataccatctttaattaaagaaccctctttacttattataattccgatacttatattgtcctttatcgtttctaagttgattcctgtcttatttattcgaagatggtttgatactaaaacaactattgcatcagcatttttattaacatcaacactttcgcttgttattgctgcagcaaaaattgctgaagaattaaaagcaattacttctgaaatgtcaggaatattaatattaagtgcaattattacatgtgtatttgtacctgttgtatttaaaaaattattcccaattccagatgaagtgaaccggaaaattgatattgcgttaattggtaaaaatcaattgactattccaattgttcaaaatctgacttcacagttatataatataacgttgttttaccgtaaagatttaggtgatcagcgtaatttacctgacaatgtgactgttattgaaattagtgaatatgaagaaagtttattagagagacttggcttatttaatcaagatattgtcgtatgttctgctaatgatgatggtttaaataaaatgatagcaaaattagctaaatctcatggtgtaaacagagttatttgtcgactagaaaatagtggtgatgatgaagagttaaaaacagatggtattgaagtatttagtaattttattagtaataaaattttcttaaaaggtttaattgaaacaccaaatatgctaaatattttaagtaacgttgaaacttcactatatgaaattgaaatgttaaattataaatacgaaaatattctattgcgtcatttcccatttggtggggacatcatatttgtacgtattgttagaaataatgaatccattgtaccacatggagatacgcaacttagatataaagaccgtttaattgtaacaggttctaaagaatatgtagatgaactcaaatctgaattagaattttattattaatctatttaaaagagaggacaaaataaagggtatctttgaaaaataacataaaaagatacattactttatgtacctctctttttattgagatgatttgaaaatttattattactttattaaatattattaacaatggtaaaatatgtatgttaaaaacgtttataatgaacgaattaatataaagtaatataaggagataatttatatgattaatttagaaaataaaacctttgtcattatgggtatcgctaataaacgtagtattggttttggcgtagctaaagtattagacgaattaggtgctcatctcgtatttacatatcgtaaagagcgcagtaaaaaagaattagaaaaattattaggccaattaaatcaaaaagagcatcatttgtatcaaatagatgttcaaaaagatgaagatgtcattaatggctttgcgaaaattggtgaagaagttggaaacattgatggcgtctatcattcaattgcatttgctaatatggaagatttacgtggtcgtttttctgaaacatctcgtgaaggattcctacttgcacaagatattagttcatattcattaaccattgtagctcatgaagcgaaaaaaattatgccgaatgggggtagtattgtagctacaacttatttaggcggagaatttgcaattcaaaactataatgtgatgggtgttgcaaaagcaagtcttgaagcaaatgttaaatatttagcatatgatttaggcccagataatattcgagtcaatgcaatttctgctggaccaattcgtacattaagtgctaaaggtgtaggtggtttgaacttaattcttaaagaagttgaagaacgtgcaccgttaagacgtaatgtagatcaagaagaagtgggcagaactgctgcttatttattaagtgatttttcaagtggtgtgactggagaaaatatccacgtagatagtggtttccacgcaattaaataagtttaaattgaaaaatagatataagatatatgataaatccaagagtctgagacaatgagttgtcttagacttttttaataaattgacagttgatgactgaattgaaaatgcatttgtatcaagctttattcaatttcaattccaaggctagaacatagagacttttaataagaacatctatattcaacgcaaattggagaggcataggcattgatgatgtagaacgacgacttaaaaatgaattttatccctcttctagctttatattatttaatgtaatatgacataaaaaaactgcgaatagaatatgttctatccgcagtaagtaattaaaaagcttaatctttaacatcgctatttgctttatcaatgatacgttgacgatacttaaatacatttcttgctactgtttttaatactgcataaagtggaacagcaattaaaataagtgtgaatcctcctaaatcacccgctgctaagataacaacaatgattgtaagtggatgaatacttaatgatttacccatgacgttaggtgtgatgacattaccttcaagttgctgtgcaattaatgtaacaacacaaacccaaataaatgttgatggaccatcgataattcctaatattgcagcaggcgcaaatgataaccatggtcctaaaaatgggattaagtttgctacaccagcgaataatacaagcaatggagtataaggtaacccaataagggtataaccaatataaagaataatacctaagatgaaactaacagtaacttgaccttgaatatacgattttaacgtataatttaaatctttaagtaaatcaacaacaaaaactttacgttctcctttgaaaaatttaccaattgctggaataaatttttcatgatcttttaacatataaatcaagaagaacggtaccataatcaataagaagatggttgaaataagagatgtgatataagtgattgaatttgctaatataccagttaaactatcactgattgatttcattgttgaattaattttcgctgttacatcacttggtaatttatccatttgatttaatgagaaattaaccacttgctctgcatcacgttgtaaagttggtgttgctttgattaaattattaacattagaaataataataggcgcaatgaaagctactacgatagcgataatagcgattaatacgataaagatagttaaaatacttgcccaacgtgggaaaccccatttttccaaaagtgtttgaaaaggtaagcagatataaaataaaaatccacttaacaagaatggaagaaacactgaaccaataatagttgctataggtgtaaatacactatgcacttccataaataactttataagtacgaacaggatgattaagaaaatcccagttcgaaaccatactttattaagcatagacttacttcctcctaaagtaatgaattcattagtaataagtatatcttaaataagagatgttaaaaaggaaaagttgattaactaaaaaagaattatattataatatttagttgtataaaaatagatgagcttaattaaacaattcctaattttcttaaaaaagtatataaaatctaaaataaaaaagcttattataaacatttatatcactgtcactaataaataaaattgatacaatatgaatatatatgaaggagagaagataacatgggagaatttaaagctggaaaaattaataaatatattttgagtagtgaaattctagaaagagatatcacattgtcgatttatcttccagaagattttactgaattatttaagtctcaggtgattatttgttttgatggattggattttttccgatttggaaggattcagcgtgaatatgaacgtctaagaaaagaggaacatattgaacgtgctattattgttggatttcattatgaagatgttgagaaacgtagagaagagtttcatcctcaaggtagtcgtagtcaaaagacgattcagtcagtagttaaagagcttttacctttcattgatcaaacgttccctacatataaggtgggaaattctagattattaataggagatagtttagctggaagtattgcctttcttacttcattgacttatccttcaatatttagtcaaatagctatgtttagtccgcactcagatcatactgttcttgaaaaatttgagacatgtaagcaacgtaatcgattaacgatttggcatgcgattggtaaagatgaagtcgattttaaattaccaacgactggtgagcaagcggattttttaactccaaatagaaagctagcaaaccttattgaacaagatgagcgtgtcacttacgtatacaatgaatttaatggtagtcataattggaaatcatggaaacctatgctcggagatattctctattattttttaaataataataaataatagtacatattaatagtttacaaatctttttttgaaagccttttcaaaaaatgttgtatctaataacgtattaaatagaattttgatataatagaagtatgttaaacaaaggaggaatttcaatgaagataggattagcacttattccgtcacaatcatttcaaaatgaagtagatggctatcgtaagcgttatgatactgagtatgcacgtattatgccacatattacgattaaacctcactttgaacttaaagaaacagaattagatttatttaaagacgaagttaaacaaacattagatggatttaaacctgtagaggtccacgtgacaaaagcttcaagctttaaaccgacaaataatgttatttattttaaagtagaaaaaacagaagaattagaaaatttatttaatacatttaataccgaatcattttatggtaaagctgaacatccattcgttcctcattttacgattgctcaaggcttaacgagtcaagaatttgaagatatatttggtcaagtgaagcttgcaggggtagaccatagagaaaccatcgatgaactttcattgttacattacaatgaagatgaagatagatggaacattgttgatagttttaaactagcataatatgtatataaaaaaagaagtcaaaacattttagttttgacttctttttttaagaatatttttgatgctttctacttttgataaaataaatgccataaaaaatagcgagtaatagaaaaatcaaagctgagacatagaatgtattatttaatccatttgagaattgagcgataaggcctccgaaaagaggaccaatcattgaaccaaagccttggacgctattaaatacaccccaagtttcttcttgttcagatggatcgatatgtccagccataaaagtattccaagcaggtaataaaatgccatacattaaacctataaaggcggcaactatccaaacaacaataatattgttaactagtgagagaccaaaaataaatagcgtaaacaatatgaatcctacaaaaataacggtatacataaagccagtgctatttttatcgatcattttagataaaaataacattgatattgcacaaccaataccaccaatagcgatagcagcagtatattcaatagttgttacccccacaacttttgtagcatacgtcggcaatattggaagcaaagctgatattgaagcaccttgcaacaaaatacctgggaataaaatcatatgacgtttcattacctctacgatttgacctaattgttctttcacaggtttagtattataatttgtgagttttacatctacaaaataataaagtatccatgcaatgataacgacaagagacatcgcaaatgcaaatcgcgttggatgtattttgactagaacattcataaacgcccagcctacaagcaaacctaataaccatgaaaagtatacataacccatttgtttgccacgttgactttcttccacactagataacatgattacccatattggacttactgcaatccctagcataattgcactaataatgataatgatgggattagctggaaagaaaataattagaaacaagcttaaaaaagctaataaaaaacctaaattaaggacgattttagtcccgaatttctttaataaaaatccaatcacaaagtttgtagctgcatctgaaataaaatgaatagatagtgctactgaagtcacagctacagcgatagaggttacagtaggtaaatagttaacataacttaatacatacattcctctagcaaattccattaaaaataaaataacgagcattattttaaagtttttacttacgcttttattgtttgacaaagaacttggcatataatggcacctttccataaatttcttgctgttgagatgaatgatcgagcatattcaataaatcgatacaaagtcgatgggttgaataatctactctatcttgacgcattgtatttatcattaaagttaatttgttcgaatcatgtgttaattcagagacaatgtcaattgcatcttcaggagtatcagcaattctaccataccctttttcttggaaataatacgcattttctagttcttgtcctggagcaggatttaagaaaatcattgggatacttcttgtcaaaccttcggatattgtaatcccacctggtttagtgatcattaattgacttgaagccatccattcattcatatgttttgtatatcctaaaataagaacgttgtcgtaagatttaaatctagcttccaaattacgtttaagtcctttacttctaccacaaatcataacgacttgagaatgaggacttttttctaagatacgttctatcatatgttcaaaaccttttgatactccaaaagcacctgcagacataaggatagtagtttttttagggtttaaatgatatttttttagccaagcctgttgatcaatatccgcttcaaatttatcagaaatagggatacctgtgactttaattaaagatgccggtacaccaacgtttacgaagtcttcttttgtatcttcagtagccacataatatctatgagaatttggagtaatccagttcttttgtagacgataatccgtcatgactgttgcgatagggatacgcatgttaaattgttcagttaatactgacatcacgggcgttggaaaagtcattaaaatcaagtcaggcttttcttttaaaagtagattaatcagtttatttaaaccatagtatttataaaaacatttatctaattcatctggtcgactataataaaagtttttatacatatttctaaaatatttaaagctattgatataccattttttacaaatagacgtaaggatgggatgtgcttccataaataaatcatgctcaataacagaaatatgagatagattcatgtcattcaattgattgacaatactttgtgtcacttgtaaatgaccattcccaaatgatccagtgataatcaatatctttttattttgagtaaccattaatagtcaccctccaataatttaagtttaatccatcgaatgatgtattacagtaaaaatacacactaggataaataatatgtatttcattcaagaaagtcataaaatttatttatagtgaattatagcatattcgaacagtgattactttaactttatacccttatcctagcactaataaagtgaaatgtatgggacttacactaagataagaaaaaatttataaataattaacttggaattaatattaataatatagaacatacaaaagttatttgattttgagtagttcagaatttacttttttaggtgagaataaatttatcaacaactttaaaatgtgtataatagagatattgaaaaaaaggagcgatacattttgaatgcgaatgagttgttcaataaaataagagttaaacaagttataggaactttagatatagatatcactgatattactacagattcacgaactgctagtggagaaagtatctttgtagcttctaagggatatactgtagatagtcatagattttgtcaaaatgtcattgaccaaggaactaaaattatagttgtaaaccgtaagcaagaagttaaaggagaagtcacacaagttattgtacctgatactttaagagtagccagtatattagcgcatacattatttgattatccaagtcaacaactcactacctttggcgtcactggtacaaatggtaaaacttcaatcgcgacaatgattcacttaatttatagaggattagacaaaaatagtgcgtatttaggtacgaatggatttcaaattaatgaagaaaaaacaaaaggggcaaatactactcctgaaactgtattgcttactaagaaaattaagcaagctgtagatagtaaagctgaagcaatgactatggaagtctcaagtcatggattagctctaggacgattaagaggggtagaatttgatgtagctattttttcaaatttaacccaagatcatttagactttcatggcacaatggaagcttatggacatgctaaatctttactatttagtcaattaggtgaagatttatcaaaagaaaagtatgtggtattaaataatgatgatgatttctctaaatatttagaaacggtaacaccatttgaaatattgacatatggtatagataatgaagcacagtttatgcctcaaaatatcaaagaatctttacaaggtgtacaatttgattttgctactccatttggcacgtatcatgtttcatcaccctatgtaggtaaatttaatatctcaaatcttatggcagctatgatagcagtgtggagtaaaggagtcgatttcaaagatatcgtagaagtggtgaaatctttagaacctgttgaagggcgtctagaggttttagatccatcacttccaatcgatttaattattgattatgcacatactgctgatggtatgaataaactgattgacgcagtgcaaccttttgttaaacaaaagctcatctttttagtaggcatggctggcgaacgtgatttaacaaaaacgcctgaaatgggcgctgttgcatgtcgagcagactatgttatttttacacctgacaatccagcagatgacgaccctaaaatgttgactgcagaacttgctaaaggggcaacacataataactatgtagaatttgaagatcgagctgaaggcattaaacatgctatcgaagtcgcgaatccaggtgatacagttgtacttgcttctaaaggtagagaaccttatcaaattatgccaggacacgtgaaagtgccacatcgtgacgatttaattggtttagaagctgcgtataaaaagtttggaaaatcccattatgatcattaagcaactttctgaacaaaatgaaataatcaatgtctatctatataaaaatgtgcatcatgcttattatatgatagctattccagatatgttttggtctgtagaattaaatgcacaactcaatgaacaggaaataaatgaagagttaataatgcaattatttacatttaaagaagaaagtgaagcattgcgtatagcttctcagttatctaagtggataataaaggatttaaaggagaataatgaatgagtttaaaagaagaaatagaatcaagaaagacgtttgctattatctcacacccggatgctggtaaaacgacgctaactgaaaaattattatattttagtggtgctattcgtgaagcgggtactgtaaaagggaaaaaaacagggaaatttgcaaccagtgactggatgaaagtggaacaagaacgtggtatttctgtgaccagttcagtcatgcaatttgattatgatgattataaaattaatattctagatacaccaggacacgaagacttttctgaagatacataccgaacattaatggcggttgatagtgcagtaatggttatcgattgtgcgaaagggatcgaaccccaaacattaaaattatttaaagtatgtaaaatgagaggcattcctatctttacttttatcaacaaattagaccgtgtaggtaaagaaccatttgaactattagaagaaattgaagaaacattaaatattgacacctatccaatgaattggccaataggaatgggtcaaaacttttttggtattatcgatcgtgagtctaaaactattgaaccttttagagatgaagagaatgtattacatttaaatgatgagtatgaacttaaagaagaacacactattagcaatgatagtgctttcgaacaagcgattgaagaatttatgttagttgaagaagctggcgaaaaatttgataatgaagcattattaaatggtgatttaactcctgtattttttggctcagcattggctaatttcggggttcaaaatttcttgaatgcatatgtagattatgcgcctatgcctaatgctcgtcagacgaatgaagaagttgaagttagcccgtttgatgacgagttctcgggttttatatttaaaattcaagcgaatatggatccaaaacatagagatagaattgcatttatgagagtagtcagtggcgcgtttgaaagaggtatggatgtgaccttgcaacgtaccaataaaaaacaaaaaatcacacgctctacctcttttatggcagatgataaagaaaccgtcaatcacgctgtagctggagatattattggattatacgatacaggtaactaccaaattggtgatacattagttggaggtaaacaaaaatttaacttccaagatttaccacaatttacacctgaaattttcatgaaagtctctgctaaaaatgtcatgaaacaaaaacatttccataagggaattgaacagcttgtgcaagaaggtgcgattcaatattataaaacacttcatacgaatcaaattattctcggtgcagtgggtcaattacaatttgaagtattcgagcacagaatgaaaaatgaatacaatgtagatgtcgtcatggaacctgtaggtagaaaaattgcacgttggattgaaaatgaagaggatattcaagataagatgaacacgtcacgttctattttagtgaaagacagatatgataagtttgttttcttatttgaaaatgaatttgctacacgttggtttgaagaaaaattcccagatattaaactatatagtttattataaaaaatgacaatataaggtttaatttaaaataataataaagaaatacaatatttttagctttaacattgtttatatataacaaatctggttataatactcttaacaaataaatacctatgacttaatgtcagaggggagtaacttgagaatttgaggggctatattactaacatcttaaattcagcattttatcgtcattacgaagttgatacttccggtaaaatgagcaaatttgctaagtgagacctttgctatgaattagcataggtctttttatttgtaaaaaataaataaaggagctgtcttttcatggatccaagcttaattttaccttatttgtgggtaatattagtgttagtatttttagaaggattactagcagcagataacgcggttgtaatggcagtaatggttaagcatttaccaccagaacagcgtaaaaaagcattattctatggtttactaggagcatttattttccgttttattgctttatttttaattagtattattgtgaatttctggtttattcaagcgattggtgctgcatacttaattttcatgtctattagaaatctttggaatttcttccataagaaagatgaagaggaacaagttggggatgaacatcattatgatgaaactggcgctgaaaagaaagtaagtgctggaaaattttgggctaccgtatttaaagtagagtttgctgacattgcctttgcaattgattctatgttagcagcaatggctattgcagtgacacttcctaagatgggtattcattttggcggtatggatttaggtcaatttggagtcatgttcatcggtggtatgattggtgttattttaatgcgttttgcagcaacatggtttgttgatttattaaataaatatccaggtttagaaggtgccgcttttgcaattgttggctgggtaggtattaaattagtagttatcgtattagctcatccagatattggcgtattatcagaagacttcccacatagtacgttatggcaagcaatcttttggactgtaatgattttattagttgtgattggatggttaacatcagtacgaaaaaataaaaagaatgctaagcattagatgtaatcgataccttttgaagtttttttataaaagacttcaaaaggttttttcaattaataactattgaggctgggacataattcctaacaaaatagccagtaaatgagtttattataaattcatttactggcttctttatttacaatactacgtattgttggctcgctttcttaggggacagcttcagcctgttttttttttttttcaagcagaagacggcatacgagattcctctacgtctcgtgggctcggagatgtgtataagagacagcgttatatagttattatacttactatatttaaacttttattcttgaaaataaaagatatacatataattatacaaattccttttattatctttatatgcttgttatatacctattatacgcattattacaactttctttatataaaatcctataataccatataaagatattatatagtcttttatcattcttacattatatatacattaaatatatatataatgtaagaatgatttaaaaaatgttattataaatagaaagaagcccaactacgggaatagttaggcttctacggtaacaaaaaagatgtttttgtatagttgttgtattcatattatatatattaagatttattagtgcaagtctaatacatatatacttacttatcacttttttattacctcttttaaaaatttaaatacgaaagaggtttttgtatgtctaattttaatattaaagaaatccaaaaagaaaaattctatcgattacctaaagtattcttcacaaatcctaaatatactaaattatctaatgatgcaaaaataacttggtcaatattaagagatcgtttagatttgtctataaaaaataattggatagatgaaaatggggatatattctttatatatactaacgaaaagttaaaaaaaatcctaaatattagtagcccaaataaattatctaaaataaagaaagaattaactcgagccgatttgtttagtcaagtcagagtaggattaaataaaccaaataaattatacttaaaaaaaccagaagtaacaaaagctgatgtttattgtatttcacaacaagaaaatgacgtagaacagcaatattctacggatgtatcaaattcatacatccagaaatatgataatgatacatcaggaaatattagaatgatacatcatgatgtatcaaaaaaatacactaatgatactgattatattaagactgattatactaagactaagagtaatgatatggatgatttgaatgataagaaattaacatatcctagtaatcatacaaatcattcaaatcactataattcaaaatttaatgatgaagctttaaagtttcaattactcgaagaactacctcaaagtattcaaagttatgtaagtaacttttctgtaaatgaaattaaaatcatcaaacctgtattattaaaagccaagacgtcctttaataattctattgatacatattacttattagaagatatggagatcgaaatacttcatgttcttaaacggtttaaagccatgcttattcaaaaaaatgaaaccgttgaagccatgcaagggtatcttatgaaatctcttaaatcggaatttgcagaaatgcatacacttaataagcgacgcgataatttacccattacttctttatttaatcaataatgtaacttagtaagcgaatgagagaacatctttatataggtgttctcttttttatttacaagtggttgctaagacaaccacctagatcgaacgaaaggtaagggaggggataacaaaataacatcaacacaatatcgaaacatagcatgctgctattaaagaaaggaggaagacttatgagtactaagaaaaagattaaagttactttggcaatgattaatgttcttttaactgcagtcgaactttatcttcaatggcaattgagtaaatctgaaaatgaactgtagttaagcaagtaggtaggactaaaacgtttctgttttagtcctattttttctataaatggttattattcatttgaaaatggctcaaacatgtcgcataagatgaaaaataaaatgatcatttaacgttgttttaactttaaaaattataaaaatactaaccgtttttatattctttagcaatctttcgtagttataaaagtgacttaataaaatcgtttttgctatttattttgttaaagattggaaagaaaaggttgaatttattattccaaaaaatcaaaattcagattcaattgatatacatcataaacaaaaagtaagtcgttaatgttcaagacatgggtcgaatataattttaaatttgaattttttctatcccaaactaagtaaatatttttacttagttttctctttttttatcttcaatcattttactaacaatggttatcttgaaaataaaaataagcacttaaagtaaaaagtgaacaagaaaatagccacttttgtcttaaagcacgttttgtttttggaaatattacaaacatgagagtctttttaaagagtatttgacatgagcataaggaaatccagtaccaccttcggtggtattcagcatagctgaaagattttccttttattcgttctgctcaattgttcaccataaatagcttaaaagctttatataaaggtgattgtaagcattcatgtgcatttgtctaatgggtgtaatataacactttattgcagactctttacaattattacaagaccactttgaattgtctgaagactcctttttttgttgatttcataggcttcagtcgacgtcgagactcttaagagtcttaatttttttaaccaaagactcttaagactcctacttttagtattaatatcaaaaataaaatcactcaaaagtaagctaagcaatttattcatttgttttactttttgaatttgaagaaatactttttgctcaatatcgaattcaatattgatcatattatttgtttttaaatccaaagaaaaaaggaaagaataaaacaatttctatacttttctatgttcaattttattaaaaagtgactcgaaatgaaccttattttagctttttattaatttgaaaatttataaaaagcgataaaatacgtaataagattcattgaatgatcatactccaaaatattatttttgactttttatgattccataaatatctaaagtcataaaaatgaacgacatatagaagatatttttgaagaaacattgatgagtatattgatccaaaatagtttgagattgatttcaaattgttgattgttcatagctcttttgttccaaaaattgtatttatatttttttgattttaatcctatatagaaataactcaaagcagttttgtaagtcaaatttatgttctgaaagtgattaaggtgtgcattgaataaatataactgagagaaaaatattagaacagagttcaaaacattttacagaaagttttagaaaattatttaaatataaagaagttagtataaatttttagtttttttctgacttttaatttagcttatacttgtgttttaagagtcattaaaaagtttaaataaatataaaacacccttaagtgctctaaaagtgccttaaaatcgcaaataagagtatttaagttttaattaactcttacaataatttttaaaaaggattgaaattttatgaaattatcatcttggataatcgctttagtaactggaattttgatttttattattacattttattttggaaatgaaggttactttggaaatgcgggttttctatcctcattatttaatggagggattggatttataggagttgcacttgctgggaagaatgttaagaagaagaaaaaataagaagtgtatgtatgccgagagaatttattgtgcgttgagaagaacccttaactaaacgtcaatttattaatgatttaaaacatgtttacgataaagttttgagatgaacttatactgaatatagtgagctttcttttaagaaagttattttatttactgcctatgaagtaccgaattatgaagtcttagaatttaacattagtaaattatgtaaaaagctcgatgagatatggtaaaaaatgaactaatttttgtattgttcttttcactatcggaagtatatgtgatatggagaaatctataggggagtcaatattgatgtagctaataatgtgcttgatgctgcgctaaaaattagtttttttaaagcaaatttatacgtaacatatattttacaaagatgaaagagaggtaaaaatttgctttctttacttttatttcaattattacttttatttggagtatttttaatttttattttgctaacttatggttacttggaattcgattatattgcgatgattgcaatgatggttttaactatcttttttgcttatatttattatttattaatttttaataaagatgataaagatttcgacaaaaaaagagtattatggtcatctgctgtatttttccctggtattattttaatgatttatttttttattaaagtttttctaaatttttattaatacgtttctttctgagtattttgttagcataaaaaataaggagcgtgaaaaatatgtctgagaaacaaaaacttgagaatacattaggttttaattattttgcattatttttcggtttattatgttttattattttatattttttgtttgattctagctttttactaagctttttagtgacaatgactccaataatcagcggtgctgcgaatattattaaaataaaagagaaagagaaaaagtagaccacgcatttatgacgagaaaatttattgatgttgagaagaacctttaacttaacttggagacgaatgtcggcctagagtgagctattaagccgaccattcgacaagttttgggtttgttaaggattcggaggctcaacgtcaataaagcaattggaataaagcaaaatctttaatagatttaaaagtaaggggagactttggatgattttaacgattttaataatctttttattgattaatgttttgcctgctttttattttggaaaaaagtattttaatttaaaaaagaataagtctgaggatgaagattttgaaagattgtctgattctatggtgaatgcagataagataataattccgctttctgtaatcataattttaacactttattttgttcagaaataaggttttgattttgggttttagaaacgagttgaaaacgagtttcttcttgtcttgataaatactttgctacaggctgtaacatctaaatagcttgattaactaaatttaaggagttgatataaattgtataaatacaaaatttataatagattatctactgctctctccaaaattacagatacaaatactaatgatgtaataggttatataaaaaaagattatgctaacattataactcgatttgttgatttaataggtgatggaaaattttttaatggttttaaagtttatgataataagaagaatcttttatttaaatctaaacaaaaaagtccatttaagtataaacaatttgttattagctttttcaatgacaacgagaaaaagattacttttgaaatatcagataaaagttggtttaaatcttctgaaaaaatagattttaattttttggaagaaacttatgaattgcataaaaatattgaagaatggtcttatattattaataaaaaaaacgataaaaaaattgccaaatggagaaatccgattacttctcctacttcaatttattttgaattattagacaataatctaaaagaatatgatttacaattactaggtttatttcatacttacttatacagcgattagactttagattaatagagaaacacgacaatcgattgctaaagatttaagcatgttgggagcaaacgcaaatcaaatcgctaaatattgcaaccaacatcaatacgaagcactaaattatgaagtcttagaatttaacattactaaattacgtgaaaagctcgatgagatatggcaaaaaatgaactaatttttgaattgtctttttcattatcggggggggtatatgcgatatggagaaatctaaactaagacacgttcttattcttttgcatttaatatttagtgctgtattaattatttttatctatatgttaaatagtgctttattcaaaaatgtatggatactaatagcactttttatttatccaatagttttcctaagtattattgatgttatagcacctaaacgaaaacgagatgataacaatgggaacaactaaatcaacattaagagtgatcaaatacgctaaagggagttttaaagcaacacgtgaactatatgaaaaaacgagtggcaagggtggtaatgaagaacacatagttaccagtcatttaatctaagcgaagtagcactaacataacgtaatcaacttgaaatggaattagtcgagaaaattgcaccacattatcaagtagcgattagcgattaaagaagcatcaaaatactcgacgaggtcattagactatgcaaaaaagagttttttaaaatttaataacttttatgataaagtttacttaaaaaaggagcgactaaatttgtgaaagttataagtattattttcggaattttagttattctttcttggttatttgtaatgagagaagacagaaaaggaaatgaaaagacagaaaaaggtaagttagtcatactaattgcttgtttattaacctttatcatgactttaatgaatttcttttattagactacggatttatgacaagaaaatttattgatcgttgagaagagcccttaactaaacttgcagacgaatgtcggcatagcgtgagctattaagccgaccattcgacaagttttgggtttgttaagggttctgaggctcaacgtcaataaagcaattggaataaagcaaaaattttgaaataatataaatatcaagaggtgatttattattcaaaataacaaaatcgatattaataagctcagtacatttcatcgtatttcgtttgttatgaatattttctttttaatttttatggctccaatttatagtctagataatgtctacttatcagttgcttggactattatgggtttagtaaatgctatttatttaatagttaaacaaagacagggaaatactaataagcgtatttgatgtactgataaaaaagagcctaaacatgggttcttttttattttgagcatttttcacatagtactttttgatttttggcccaactttttagatttgttattccgttaagattttttgaatttgtgtgtattgttatattttcgtttttgtcgatttctttatcacaattactacactttaatttttcaagaaacataaaatgacctcactttttgtggtttttgaaacgagttgaaaacgagtttcttcttgttttgatactttataggaataatgtttttttttaataggaatagatacttatatattaacttgaatgatttaaaaaatttgaagatatctatattttactaaaatcaaggttgttattgttagttttgatgtttatttagacatagaatgacttatcggaagtcatctgtaactcatctagtacagatgatataatatacaggtcgcctatctctcaggcgtcaatttagagacgcagagaggaggtgcatatcagatggtcgaagctcttgttcacatcatgaccacagtcatcagtggttgtattgttgcgttatttacgcattggctacgtacacgtaacaataagaaaaaataggcgatattagccaacacctaaaaatcccctcactactcgcaatagtgaggggattggtgcatataatgcacgaagctcttgttatctaaattataacactggttagtagaggaatgcaaaaatactactgtttaaatatatatcaattatattgattattaatatctggaaaattcacttcaacttcttgtttaatattagtaatattatctttaaaatcagtaattttatggattatttgttcgacaatttctctttcaacagggttatgaagagtagctaatgcttcatcatttgggatttctatattctctgaagtagtatacatttcattcataataactaataaattatctctagaaaggtcagaaggagatattttattttgttcaacgataaattgggattttccattatttatttctaagattttcataagtttctcctttttttctgtaagtttcaattcctgattccatagcttctacaaacttattataactagactctgaaacgcctaaattattggatatagagtttgaagaaaattctccagtgagtactttataattattgttttgatctttagttgttactattaggtaatcaggattgattaacgctcctaatgtagaattatgagtaactacaaaaacagtactctctctggataaattgtttaatgccggtattaattcgtcacgaatataggcgttgtcaagcgaagcttcaggttcatcaataagaatgataggtttatttttagattcttcgagtctcatcattaatgcaaaaccaactgcttggcctccagaagcaggggttccatctgaatctaataattcaacagttaaatttataaaataatttgctaaatcagatgttttataaaattttttcttttttaagttatttaaaaaagtgatgtaatcactttgtagatatggttttataatttcatcattcacagcttctctggtggatgcgacactttgaaattgtgaagcgttctcgaaaggagatattttaacaatgatttgatacccataaacgttttctcttttaagctcttgttcacaaattatgtttttcataaaagtatttatttgtttttccatctgctgcttttgaattatttcagagaattcacaatctaatactgttgtaactcctgttcttgattggactaattttttaacagattctagtatttcattaactctttctttaattttattttcttgttgcttttcaatatataagattctgagttcattatatgtttcgataaatacttgtttcttttcatttggatttttcaataaggaccaaaattcattactttgaataagactttttaaatctgttaaatatttttctaaattagcagtaggtattttatcaaactttgattctttatgtagtagatatttttcttttgaattacttaaattattatctttagcaaaatttttaacactttctaaatacttttcaaccacgccatcaaattcattttcatctctgtttaaatactctattattgtccgaaattgagattcatattttcttttccaaatatcaaatgcaaattgtccttgttcttttctttgtttttctatatactcgtctgctctagctgtttcgaattgagcaatttcatagtattcatcatcatcatattgcttttttatattttttaaaaattctgtttttccagttccccttttaccaactattaaattcatacctgtggaaaccatatgattattaatttctataacatctcttaaatttttttcgttaatatggatcgcttttttattctttatacaatttttgatttcagaaaatgtacaattatcaatttgtaaaaaagtatttttcatttttaataaatgaatgttttttcttttgggctcggggtcatcatctgcagcatgtgcatcactaaacaaaagaggtattaacatattttcttgattgtaaatagactggaattttaattgatttgctaccccaccagctattgtaatagaagaatttgataatttttcaggtactgacaatgaattactttttcccatttcaaaaatatatatgccattctcccaatttaccatgttattacaaaaatcttcggtacttatcgtgtctcttatttctaattcatttttagataaccagttagagaagttaacaaggttttcaatgtcctcttctgaaaatataatatttacatgtccttcttctaagcttaattcaatgccaggaaaaactgtaatatcgggtagatcttcttttacttttttaaaattttctaaatcaaataagtcatgattagtaattgctatagcatctaattcagcttcttcaacatatcttttaatccaatcagaagaatatgtaaaatcataatctttattactagatacggtatgaatatgaaaatcaatacgtttaaccatgtgtttccaccttttaaattattgaatgtatacatataaaaataataacatattttaagttaaaaaatttatttattttacactttacttttttggattaacggaaaactttcaagtacttttaatttacgtataatgaaactatattgataaaaaggattgtatattaattatgaggtggaaagcaatgatttttggctatgcgagagtatcttctgtcgatcaaaatttaaaaagacaactcaaaaatttaaaaacgtttggtattaaaaaatatttatagaaaaatagtctgggaaatttatcgaaaatagatcattacttcaagaagcacttaattttgtgagaatggaaggagtagaattaattgattgtttaggtcgtaattacgatgaagtgattggtaatccatcattagataaatttatgaaagatctaatcattcaaatattagcaatggtttcagaacaagaacgaaatgaaagtaaacgtcgctaagcacaaggtattaaagttgcgaaaggaaaagatgtgtataaaggacgccctttattatattcacctaatgcgaaagatcctcaaaaatgtattatttatcatcgagttgtagaaatgttagaagaagatcaagcaattagtaaaattgcaaaagaaatgaatataaaaaggcaaactttttataaaatcaaacacaataatgatttggtttaataaactttattttgatgcaaatgagagcttctcacagcgtttcaaaacaattgataattaatctattaggaacttttcaagaaaagatagcgtaaatatgttctttctctatattcttctactcattaaaattcgttattggaatactatttttcagtactgaaatcaacataataattagattatctatagaatttgttaccaatctgctaaaaacttatataaatataaagtgagaagtaacgtacgtttttcataaatttattaaatttttctatactaatcataatatagaaactataattattagcaatgtgcgaaattaattcatataataataattgacttcaacaaaaactaggctacttatatcctgtaagatacagagaattagcagcctagaacatagtttttttattaaatttccattttaagggttcagtgacttcattaacttgccatgttttttattatacaattagttaccaaataaacgactccaaaatccctttttaggtggttctattttcttattatcatcagtactactcttcgttttttcaacgaacttatcctcttttgttaattcatcctcacttgtactgtcatcctttttctcttcagctatattcttatgatttacttttgttgttgattgatattttgaggttcttcagtaaaatttacttcttgataattaatattctgtctatcattctgtcgctgaatcaaaagaataattaagctgtctttcttcttataattggctttttagtttttgaatctttttattactttctaatgctaaaacttattggttttctagaaatctgaaatcactacagtttaaattttaataatgaagctttaaagtttcaactactagaagaatcacctcaaagtattcaagctatttatgtaacttttctgtagctaaaattagtaaatctatattattaaatactaaagcattttctaacaattatattgatacgtatttcttattagaagataatgaaatacttcatgtacttaaacgttttaaagtcatgcaaggatatctcatgaaatctctcaaatctgaattcgcagaagcacatacttaaattaattatttaattaaatttttatatgcaaccaaattacctaatctttaaattacgtactcctgtaaaaataaatattattgatattataataagtaacattatacctactattatatcatttgaactttcaaatcccatagatgaatctataatatctaaaccaactctataactcaaagtggtaggtatcaaattagaaaatggtgctggtataagaatcagagataccatcgtaatacctatagttataactaatgagacaatataattattgaatatagtaactagagtaatagatagaggtattaggaaagttgttaagagtaagttaaggactgtaaaactaataataatcattactaaagattcagacaaaccgtcaaaaataaaatagaataataataataaaattaaatttaataaatagagaaaagtacaatataaaaaagatactaaaaattttgaaaaaaacaatttatacttatttttggaataagaaagccagtttaataaagtatggtttttaaattctatatagaatatagatgatccaataatacctatagctataggcgttatcatgaaatattgattataaaatctaaaataaaaaccatcaattaacgataaatctttattattaataaaaaaattagcaatattcataataaaaggtagtaaacttaataaaaaaacaattattataaatctttcacttctaattttaataatttcattttttataaaagttatcattttaaataagcctcctctaccttcatactcataatttttaaatatacttcttctaaagtcatttttttagcattattgtaatatttaactagctcattataatctcctaaaatataaaaacggccactactttttataattgaatattcattattaattttaaaatccaaattatttgtcctatcatttatttccacaagactataatgtcttttattatttctcaaatgagctatcagctttccattttgaataaaaagaaaaacatcagtaaactctgataattctcttaaaatatgactagaaactatagtaacccttttttcgtttttaatttcactaattattatatctcttatatcttttattcccataggatctaaaccgtttgaaggttcatctaataatattaagttagaattaccaattaatgttttagctatacctaatctttgtttcattcccattgataaatttttaaattttttatttcttgcactatttaaatttactattgataataatttatctatatgtaatgtattaataccaagatacctagcatgtaatattaaattttcttcacatgttagattggcataaaaagcagggtaatcaattaagtgaccaatgtttttatttttttggaactctatctttccagaataatcaattacttctaagatagatttaaataatgttgtttttccggcaccatttggtcctaaaagtccataaacggtattttctataaatttataatttatgtctttaagaatattattatttttcaaattaactgatagactgtcaatcttcaacatagcaaataccaccttcttctatatttctaatcttaaaacattaggaatatcatcattcattaaatatatcaatccataggaaataccagacaaacctgttaataaatctatactttgaatatcttctcctactccacattttagatctttagcattaaaatttttaagtatatcaaatattatattccccattttttcacttgttggtaatatatcttttaatatcatcgcattacctaagtctccatgacacaagcaatgggttctagaaaaaccttcttcaaatattttttcaatgattttttttctatcattacttgtataattactcttttctctatttaacataatacctggagacccatgacaccatgcataaggaggtcttgcctcttgactatacggatgaggccaataatgttcaatgcgataagtctcttcatattgattagctagagaaataatattttcaatatttttatcatatttaaaattattgatatataaactcaaggcataggttataccagatactccatgagcaaagccaacagttacatcatcttcactgtcttgccaattaattaaattattattggttttatgcattttattgagtaaagtgtttactgataactcaatagcttcttcaatagtatttttgtaatctaagttatttactatatgatataaattaatcaaaattactagtactccagaaagaccgctgataaagtcagtatcattttcgactgaaattttccctttggataaatttatatatttaattgcagtatgtatatatttttcctttttagtctttttatacacaactgcgcataaatatatataagaatatatgccgtcataggctccaattggatagtctgtatagtattgaatttcttcctcaatttgtaatattaaattctcaacttttaaaagatattttttgtcttgtgtatgttgataaagagcccaataatataaagccataccacataaacctttatataaatttatttccattacttctctttcaacagttctagttccaggagtaccatataattcctttgtcatccaactatatgtattatttatttcaatttgctcttctaaaataatctcttctatagaacaaattagagagttgaatttttcttctttttcactagtagtatagtttttaacattgttataatttttaattgaatgcaacgtcatatgaggtatgaatgagctattatcttctcttaaagaatctgaaataatagaaatttgccatttcatatcgctctcattcaatttactaattttataagaaacactttcttttaatggataataaaaaaagttttcaattactttagtttcattaaataaatttttagatatcccattgtaatagaaataaggaatattcatatctattaagttatttatttcatatttagacaacctatcaaaatcgttatatagataataagcaataaataactttctcagagttatactctgaagtattaaaggatggaaacttaaattgagtatacgtgcatactgcattgttgcattattaatatatctaacattaacgtcatttatattattttcaattaaactataaaactcatttttattatattctataaaattatagcaatctttaaatccattaattaaattaactttatagtttttttcgttaacaaactcctcattaattttaggatgattttggtttgaagataacttaatataatctgattcaactctcatattagaagatcgtacattttttatagttggaacttttaaagaggaaagtccttcttttccacctaacccgctaaaatcggctccttcattattaccgaaaataaagggaagaatacccgtagtttttacagatgaagataataaatagtgattaaaataagtagcatctttaaaagaatttttactaagtttgtttcctatcacgctttctaaatccactaaaatcgggtgctcttgcgaggctatgagattttctgagtggaaatcagtagcacctaatacatatagcaagaacaaatgcatgcctaattcatagtaaaaattttcaatttgagtaatatcattacactctttataatctacttcattaacccaaaaataattctttttaactattatttccgtttttttaaggttacaattcaaggatttattaatataatctagtattttattataaagttgatctattttaccatttctcggtttgaaatagaatgatttatgtgtatatatacatttgattaccgattcaccttgattgtgagtatcacccaatcctaaactaatatttagtaaataatcttcattactatcaattaattctttttcatcttttaacaataattcaaaaaaattattgatatatttatctatttgtctaatattagcttccaaaaaaagtataagattataatatttattaataaattctaatctatagtttttttgactaagtctatttatatattcattaaattgttcctcttctgtagaagatttcaattggccttggcttctatttaaatttaaatcataaactattgttctatatgaaatcctcattaaattttcagaaatctgagacaaaatatccgaatttaacttattagctttattttcatcaatgttagacaatttttgtaatgcttttaaataatctaattttgaagatttaacaataaaaagcattaagtcttcaaaattatctatagaaaagttgaaatcatacttttcaaaatcaatcttattattattattaatttcttgattgattttcatctttaaatcttcaaattcagtatcaaaaattttttttgctactttctctaaattattagaatctaaatctttgaatattctggggattaaactattaatattcatcatttttccacctctaatattatgaaagactaggaattaaatttcctagtcttttgattattaaataaaaattagcaccaacaagttttagtaggacatatagaacattcccaagtaattgtacaatgtttcccatcattccctgttttttgagagaaagatttttttctaatttccgattcaccatataaatggatatttaggtcaccatcttttaattcttgtattaaatcaccggctgtattaaataattctaaatctttattactcatttttttcctccagactttgaaaaaattttataattgtgataaattttaaattgtagtgtagattttcatttatattttataagttttttcaaaaaaactcaatagctaggaggcactttattgaaacaaaatagtagaattactttagatgaattaaacaaaattactatgggaacttcagaggtaagaaaaggaaaaggaggcggttttagtaccgtaaccgttgtaacaccaattgtaccgacatcgaagtgtgcctcaattgtaaaaccatgtaacaaataacttttaggagatgagtaaaatgactaaaataactaaagatgatttgaaaaagattacagaaaatcgtattgaagcacgtacacatccaaccgttgttcctgtaagtgctgctgtatgcggagttgctactaaattagtaccaacatcgaaatgtgcttcaattgtaaaaccatgtaataaataattattaaaaatgcccccctttaatagggggtttttgggtgataaaatggactacttaataaaaaaaatatatgaagataattccgaaatatttgaatactttttaaacaacatctattcatcttataacgattttataaccatcgattttataaataatataaaaaaaaataactttttatattttaaaaatgtaataaaaagatatctagttgttaattttcaagatacatataaaaactctattaaagagagtgattctaatttatatttaaataaatatatgaaagagttcaatttaaatgaccatcatactttaaaagaaaacatgttatataaaatgaatttatatcataaatttatttttactattatcaaaaatgcttataatgatagaaaactattagttgaagataaaggcttaatagataatattaaagttgattttggagattctcacaatggagggcaaacagtagctatagtatattttgaaaatattaaatggatttacaagcctaaaaacttaaaaaaagataaattatatttttcatgcttaaaagtaataaatgataatttaaatgttaaatatagagaacctaaaataatacttcgtgataattatagttggcagtcttttattgaacatttaccttgtaaaaatgaggtaatgataaataattattattattctttgggaatacaagcgtgtcttttatttattttaaatgctaatgatatgcattttgaaaatctaattgctaatggagaatatccagtatttatagatttagaaactttattacaaactgatatagatttttcaaactctaatttagagcattatccttcaaatgataatgttttaaacaccttattgtttgatgtttctgataattcttcggttatggatcatattggcggatttactaatcgtaaaggcatgcccatttatgatattacaatgtttaataaagataatgatcaaatttctattgttgaaagtagcgagatatatactaaaagtacacctaatatcccattgaatgctaaaaaagagccagtagaaatttatgaaaaaaaagaaattttcttagagggatttaaaaatagctacaagactattcaaaataattttcataactttttaaatactttgaataaatatgaaaatctagagacaagaattgtattaagacctactactgtttatgcaaattatatagaatatttcaagcaaatggaaaatgaaagtgataacgaaatattagatattttatataatagtattccgttttataaaaagagtaagaaaatagcagaatatgaaattaatagtcttaaaaattttgatattccttactttaaagtaggattaaaatcaaaaaaacttacttcagtagatgataatttatatattaatgaattttttaaaaaaacaccttatgaaaaattagaacaaaaactttctcatttacataatgaagatttaaacagacaactctatttactgaaattgtctattgacgcatatagagagctgaatgattcaaaaaataatgaatgtcctaataaaagagaagtggacactactattcaacatgaaatagaacttattgagaagtatctagatactcaagatactgtttttaacatagagttaaatattgaaggaaaaacagctgtaacacctatttcttataatttatattttggtttaagtggggtatccctactatacttgcaatatcaaaaaactgctaataactatttttatagttcggttttcaatggtttatatgattcaatatatacaatgtggaaattagataaatcgaataactactctatatatcatggacgattttcttattttaagtatgtatatctattaaataactttttcaattttcaaatagatataaatattgaactacaaaaaactttaaaagactatatatcttatatcgaagataataaaagttatactatagattatttaggtggtttgagcggtattatctccttattattagatttttacaaaagtaacgataatcattcatatttaaaaaaagatattattttcttaacaaaaaagcttatagaaaatatttctataaaaaataatgaaatcgtagtgaagagcgatataactaatggttcaatgaaagctggtttggcacatggaacatccggaataatatttgcattagcaaaatatcaaactgaatttcatgatgacaaattaagtgatataatagaaagaatgataagtatagaaaataatgaattagctttgatcaaaaacaatgcttggtgtaatggcctgtctggaattgttctttcacgaaatattattcagaattatggaattagtaacgaattattaaatattgtatcgttaaaatctcagttattaaatggttttccaataggagtagaatcagtatgtcatggttctagtggtaattctttaattttgaaaactatgaatatcaacaaaaataaccaacatatactgtcttatgaatggacatccgggtatttattccccaatgaaaacataagcttcttcatgggtatatctggccaattgtttaatttactaaccacttcaaaagataaagatttaattgaaaaattattaatttaatagaaggtaggatggatgtgctaattcttactaaaaataacacagaaataaaaaattgtgtatatacaataacatgtaataataaaaaaacttatttagagtgcatacaattttctttaagaaataaattaagaatactttgtaaaataaatgaaatatatacatttcaaatttttggaattattccaagaaattataatatttatttaaaaagagctggagctgttatatccacatcttttaagaaaatacaaccactatcttcctctaaaaattatgtcgatgaatatactaatccaaaaaaaattcaatgggatgtcattagaacaacaaataattatgaatctcatagaaaagctaaaggaagccactcccatagtgttggaataatagactctgggattgatattaatcaccaggatttagtagataatattttatctatcagaaactttgttcctcaccaatttcctaatcaagatggtgagtttaaagtggatcctctttatatgaaagactatttagatcatggtacgcaagtagctggtcaaatatgtgcaaatggtgaaataactagtattgctcctaatactggtataaaaatatatagggtttttggagaaagagaaggttataatatttggattatagatgcaattattcacgctgcaaatgatggagtagacgttataaatttaagtttaggaagttatttgctagatggtgattacaaaaaaaaaggggagtggaataataataattctgaaattattgcctttaaaaaagctattacttatgcataccaaaaaggatgtgtagttgtaggttcattaggaaatgacagtataaatattgacgatcaaaagattttagcttcagaaatcgtaaataaaaaagacatttctgatatacaaaaaaaatctcaaatatatgattttccttgccagatacctaatgtatttggagttgctgcagcaaattattttgataaaatctcttcttactctaataaaagtaatttaaatttagatatacttagttatgctggcgattatagcttacttgaaaaatatggaagaaaggaatggttaaacaaaaaatatattactaaagattggatattaagtacatctagtgaaactgtttatacatatacaaccggaaactccttagctactgcaaaagtttcagcagctatagctgcaatgaatgattattataatattgaaaagcagccttcaaaaagtatatctttaataaaaagtaaatctaataaaattcttaatatgtctaatctagtttcgtctgatttaagataaaggagtatcaatatgtataataattatctacattttctatttactaagattaaaatccctaaaatgcagttattcatatcaatactaatatctactttaggcgctcttagtggtttaatgatacctttatttgctggaaaatttatagattctttttccttaaaaacaattaataaagatatgattatatacttattaatattatttatagttaacggtattttaatgggtttggggaattactttatgggtgtagtaggtgaaaaaataaattattctattaaaacagtattctttgataaaataattagactaaaattgccatttttcgatcaaaatgatactgggcaacttataagtaggatggttgatgacacatctataattaatgattttttatctaataaattacctactatttttccttctgttcttactttcgtaggggccatatttttcttattagttatagattggcaaatgacagttatttctttacttacaatgctaacttttattttatttattgttcctataggaagaatagttcataacatttcattgaaaacacagaatgaaattgctaactttagtactttattaaataaaatatttactgaaattagattggtaaaaacttctaatacagagcgtaaagaaacaaaaaatgctaatacaattttaaataatttatatagcttaggtgttaaagaagttattgttgaatcaataataaatcctatatctagtcttattatgttgcttacaattggtatcatattaagtgttggagggattcgtgtatctttaggcatcattacttctggtgaacttatagctatgattttttacgttttccaattatctaatccaataaatgaaatacttactttttttactgattataaaaaaactagcggagcaagtaatcgtatttatgaaatattccaagaagaagaagaagatatttacaattccttagaacataaaactttagataataatagtttgacatttgaaaatgtttcattcacttataataatgtttctattttaaataatattagttttaatatacctaagaatcaacttacagctattgtaggtccttcaggttctggaaaaactacgattttgaatattattgaaagattatatcctatacaatctggaaatatttattatggtaataaatctatatttgagataccactaagtacttggagacgaaatataggatatgtaatgcaagacaaccctatgatgaataaaagtattaaatacaatttattgtatagtacatcgaagtctttaactaatcatgaaatcataaattatactaagatgacagatagttatgatttcattataaacactatcaagggatttgatactattattggagagcgtggcattaaattatctggtggacaacgtcaaaggttagatttaacacgtaatttaattaaaaatcctcctctatttttattcgatgaagcaacatcaaacttagatagtgaaagtgaacagaaaatacaaaatgctatcgataatttgaatggaaaaaaaacgatagtaattgttgctcatagattatctacaatcaaaaaagcacatcaaattatttttgttgaaaataataaaattaccggtattggaacacataaaaaattattagaaaaacatgataagtatcgtatgtttgtaaatacacaaaatttatccaatttaaattcttaaatatggtatcataatattgaggtgatttaatgaaatttttagaattattaggtacactatttggtataggtatagtagttttccctttgtctgctttaggttttttaatatttgaattcaccaagcctgttgattctagatcatttttagtgtcagtattttgtatagctttatttgtaatttgtggctttggtttagtaattgttgctaatattatagaatgacttatatataatcaaaataataaaagcaagttctattgagatgatatagaacttgcttttattattttgattagcagctgtaggtatcttaaatcaagattgaagaagaaagagaaattgtaaaaaaattcaaactgttcaaaacttttaatcaatttatctttattgcgtaaactctcgatatcttcaaataaagcataatatatattggaatattttgagatactattttcaatttttttactgatatttttattaaatgaaaatacttgtttaagtacctaggaaacaaaatcaaagattctgaaaatatgtttaattgtagccgaataaatgatattataaaaacatacaaaaaaagcaactactggaatagttgctcagtctaaagtggtagtagtcacttcaaacgcttcaattaggataagacaaaacaatgtctttttttattatgttgtaattacattatatatgtagtaagcaataacttcaagtataaaatacctaatgaaaaaagtgtctattacctcttgctaaaattaattaaatttaggaaagaggtttttattatgtcaattattaaaaatatcaatagtgagaaaccatttgaagttttacctagagaattattacaacaatgtgataaaaaacgtagtaatacagaaaataaacctttatcattacaagcaataggtttgttatgtaatttacaaagttacccagaaaattgggaaattcacaaaacagaattatataatcgctatgaaaaaaatggtcgtcgtcaaatacaaaatgcttggaatgaactcgttgacgcaaagtatattattcaatttaaaatacataacggtaataaattggattattattattactttagtgttactccaataactaacgaacaaataaaaaatttagaagaatatcataatagcgaaagtttagaaagatttgatttgaaagtaaaaactcctactgtacaaaatgaacagtgcagtcataacggactttctcctactgtacaaaatgaacagttcaaaatgaacagttcagaagtgaacagttcaaaacgtacagataatataatacacaataaatataatacacataaacataatacacacaaatataatacacactacattacaaaaaacagtagtagtagttacaatatattgattgataaaattaaaaatgaattagttattaatattactccagcatataaaaatgaattagtgaaattattctcatattttgatgatgagattattaattatgctattgaatatgcgtctattaatggatctagtccaaaacaatttttattgaaagttttaactaactggaaaaatgctaatattacaactttagaacaagcacaaaatttcaaagtaagtagtaaaaaaaataacattgtccaattttctaaagagaaaacacctaaatggttacataataaaacagataaaaatacaagtgaagaattatctgaagaagaaaaggctaagtttgaagaagatagaaaagcatttagaaaagcattagaagaagactggaaagaataaaaagaaattgagatatttgtgttccaaatttatttattaaaatcttattatattattctattaccttgctttaaagattacatttaaaaacatgattatataggaaattggaagaataattaaacaacttttactgtatactatgactaggagtgtgattttatgaaatttttagaaatattaggaactatattaggtatcggtatagtggtttttccattatcagcattaggttttttaattacagagttcacaaaacctgctaaagagagaacatttaaaaaaactgttttttgcataggtctaatggtgatttgtggatttggattagttatcatcgctaatatattagattaaacaaaaaataaaaagccgatgtatcggttttttttagtgttcatgtgaatattaaaaaattgtggagtgatgacacatgaacacattcgttttcggcgtgattttaaagagattagaagaaaaaggacttaatatacacgaagtattcaatatgagcgataaacaggctaaaaaagacttatttgatgatttataccactatgtccgctatacaaagccatgtggtgcagaattaacgatggtgacattaaatgctgatgaattgatgcattactttgtatgctgttatatggaacgttatgcttacaaattgaacgcttaaccgttacgacattttgcaaatgtcgttgaactcaaaaaagaggtgactgcaggttctgttgcaaagttaaattaatatacaaagttatgcaaaagcagtaaattatatactattgtatcaacagattattcggttggattttattatttttcatttctttgtatctatattatatgattttcaagtttgcaacagaaccaactagatcgtcttggacgtacaacgaaacaattaattgagttatctcaatggttcgatgaaaacagcattgatttatatattgtcgatatgaacatatcaactaaagatgcgatgggtaaaatgttctttacaatgatgagtgcatttgccgaacttgaagctaacttattaagtgaacgaactaaaaaaggactagaagcagcaagagcaagaggccgaaaaggtggaagaccttcattacctgattataagaaaagagaaattaaatttttatacgatgagcagaagctcacaggtgaagaaattgctaaaaaaacaggagtaagccgttcaacgatatatagagtgataaaatagttttcgtataatgaagtgtagctactaagattgggagaggttctatggaaaatagtttaattattaatgatgatattaaagaggcatggcaaaatgttaaatttgatatagaagaattcaagtatgattcttctaaactcaaagatttaataaccagttattgtgggtcatgtttaggagctacgtatgcggcagatttagacaaagaatataaaaaaaacacaataaattattacagaatatatactttactaactagaattttaaattggtataaagataatttacacaaaattcaatcaaacgattttgtttatcatcctgaagaacatctcgaattcaaaaataaaatagaaaatttattatatcctatagaaaatttcatattacccaaaggtatgaacaatagagaaacaaatcagtatttttttgaacttaacgaatcgttatcagaagattataaggaggaagtcatggaggaatcagatttaaaatcaccatctttttttattagtcataaccaattagattcagaacaagcacaaaaaattgtcgtttttttaaaaagtttaggaatctctaaagaaagaatattttgttcttcagttgaaagtacaggaatcccaggagatgcagatattaatgactatataaaaacccaattaaatgataactgcttttttatatttttattaagtcataattactttaatagcttatattgcttaaatgaaatgggagcagcatggattaatattgaagaatcaaaacaacttgtattttcacttgatgatagcgtcgtcaactttatcaatcgtactgttttaaaatctactaaaaacagacttaatatagatagaaaaggattcacttctttaaagaccgttttagttaaaaatgagatagtagatgagttatcatcctcagattttgaagaaaagttagaaactataaatatttcttgagatgttacttaaaatattctttttctgcaatatcaattttgcattcttctccactatgatgttataatacctttaacgaagattatatgcatatatgcaccaatcccctcactatttgcggtagtgaggggattttttgatgcggcttaacgtcgccttctatttattgcgtttactactaagccagtaagtaaaatacgcaactgcacagccactaatgactggtgcaatgatgtgaacgaagatcataagcatattaagcacctccttccgtcaaaaataccgccggaagttaaggcgactctattattatatcatctgtaaacacgtaagcatatccacttccgataagtgatcttatgtctaaacaactattaaaaaataataacaatgagtttgattttaataaaatgcccaacttctcctagcttagatatctactagggacaaaatctgttttattctatcttgtatactattaatgaaaatatatctatcttagcaagtgagcaaacaaaactttattttacataatggtgataatttgtttgctattaactctaggattatgtaatgtatttaaatttaatttattctctttcaaacctttaaaacgtaatgaagtaactttaattataataagctttcttgtgttatcgaaataacaacttatttactaactactttttttcctataccaaataaccaggaaagtttaaacaatctagttgatcattcgaatttaattattgcaataataacatttggaattttgatacctataatagaagagtgtatttgtagagaaatactggttcttttgcaaacttgaaaatcatataatatagatacaaagaaatgaaaaataataaaatccaaccgaataatctgttgatataatagtatacaatttactgcttttgcataactttgtatattaatttaactttgcaacagaaccccgaagcctaagtcatctaatgtaagggttcatgaaatatggagtgagaaatggaaaactttagatgtgactgaagaaataagcatgactgatgttataaaaaagtggagaagttaaacaaataataaatttagggtacaccctaatcatacaaatgaagttgttgaatttatagcaactaaaacgtatgattagggtgtatattaattatgaggtggaaatcaatgattgttggctatgcaagagtctcatcgatcgatcaaaatttagaaagacaacttgaaaatttaaagatgtttggtgctgaaaaaatatttacagaaaagcagtctgggaagtctattaaaaatagaccggtatttcaagaagcacttaattttgtgagaatgggagatcggtttatagtagaatccattgatcgtttaggtcgtaattatgatgaagtgattcataccgttaattatttaaaagataaagaagttcaattgatgattactagcttacctatgatgaatgaagtgatgggtaatccattactagataaatttatgaaagatctaatcattcaaatattagcaatggtttcagaacaagaacgaaatgaaagtaaacgtagacaagcacaaggtattcaagtctcgaaagaaaaaggtgtgtataaaggacgccctttattatattcgcccaatgcgaaagatcctcaaaaacgtattatttatcatcgagttgtagaaatgttagaagagggtcaagcaattagtaaaattgcaaaagaagtgaatataacaaggcagactatttatagaattaaacgcaataatgatttggtttaataaactttactttaatggaaatgagagattcttacagtgtcccaaaatagataacaataattaataataagagtatagaaaaaaagagagtaaatatgctctctttctcattaacgcttattattggaattgtattatttaatactgaaataaacattatgattaaattatctatagaatttattgctgattcaataaaaactcatataaatataaaatgagaaataacgcacttttttttcataaatttattaaatttttctatactaattataatataaaaactataattaataataatgtatgaaagcattcatataacaataaatatataagaaaatggggactaagattaattatgaaaatattttttgtcattttaactattatattattgtggtttggtttacgtcatagtagaaattttgctaaagataaaaaatactttaaaagtgttggaatgtttttgttaagtcttttattactcatagttacgctaatactagtatttacaccagaagataaagtatctaaagaaaataaagatgtcgtaagtaattcgcatgaaaagaaacaaaataaaagtcaaaacaataaaagtgaggatcataaagataataataatcaaacacctaaagaacaaaatactgaaaagagtgaccaaaacaaagaaaaaacacatgataattcaaaacaaaatgtaacattgtcacgtgttatagacggcgatacgctcaagctctattataaagacaaagaggaaacatttagactattgttggtagacacaccagaaactaaacaccctactaaaggcgttgaaccttatgggaaagaagcttcacatatgacaacaaatcttgttgaaagtgcatctcaattatctattaagttcgacaaaggtgatagaaaagataaatatggcagatatttagtttatttgtatactgacggtaaaatggttaataacgagttagtaagaaacggattagcgagggttaaatatgtttacaaacctaacaatacatatgaaggtatgttgaaagagagtcaacgtaaagctcaagttgagaaattaaatatatggagtgacgaagaacctgaagtgatagagtatccacaatctactgaagaacctgaaacagcagtacaacccaatattgattctgatgcaaatgtagatgcaccagaagagaatgatataccaagtcaacctaacgaccattctactaataatccttcaagtgataacgatacacctaaaccaggtgaaattactaaaggtatgcctggatatgatgcaagtaaagacagagatcacgatggaattattaatgaaaagtagttaagtaagaaagctactaaatatagatgagagatcattaattagatgttaagttcatttaatgatctctatttttatagttaatactacgatatttaatagccttcatattaataaaattaaagctaaaaaaggacgtaaaattgaatggttagagtttaccttatttcaagaggcgcttaactttgtgagaatgagcgacagatttgtagtagaatcgattgatcgtttaagtcgtcattatgatgaggtgattaacacagttaattatttaaaagataaagaagttcaattgatgattactagtttacctgtggtgaatgaagtgattgacaatcctttattagataagtttatgaaaggtttaatcatacaaatattagcgatggtttcagaacaggaaagaattgaaagtaaacgcagacaagcacaaggtattcaagttgcgaaagaaaaaggtgtgtataaaggacgccctttattatattcacctaatgcgaaagatcctcaaaaacgtattatttatcagcgagttgtagaaatgttagaagaaggtcaagcaattagtaaaattgcgaaagaagtgaatataacaagacaaacggtttatagaataaaaagagatactttctaatatagtagtaccaattaaataaatatattaagagaaataatatgaaaacagaaatattaaatagttgttataaatatttaaaatataacgtgaacccgttatgcaaggaagttagtgaaattagttttagcaatactagatatttaatatttatttatcttaacttaaagatcgtatttttagtatagagacaactcaaatgcttatacaaagcgagttaaaatcttctgaattaatgatattgttttatatggtatattacttattttgtcccttatgctgtattttcgtaaataaaaccttaataagctttaatagcttactaaggcttttaagaaagagactgttgtgaaaaaatctatatgtcctatagttgtttatcacacccatattataacataaacatatcattatgcctaagaaaccttgttattaaatgatgtatcaaatttttaataagcaagtctagaacatagatatcttagattctttttattctttctaatcttcttcccagttattattaaataaaactcaaattgttactctgaaacttttttcgcttacatctttaaaaaagaggggtaacttaaaaagttacccctcaatttaatagactcatcgttaagcgcttaaagtatgtaatatctaggcactactagatattaatataactaaatcctgattacaaaggattaacaattatttattattactgttatcagagttggcttttccacctttttgaccagcttcttcagatgaggcgtttacgcatttttttatctgccataattgcaccgtttacaatttaaatcttatttttagcaaagttcattatttctctatctgtcctactatttaggtaattgtttaaactattaatatctgtacctaaactaaaattatccgctaatagtaaccttaataatacttcaattgtttgtaattgactatctgatgagctattgctgtctaacgaattttctagattgtctaatttatcatttatacgcttaaaatctttattgaagttttcgttagttaatctctttctttttttaatgatttcgcttaaggtttctttgtctagtgaataatcctctgcaaataagtatcgccctctttcaggtaggcttgatccaatagcgtataatacaatctttcttttaggaacattgtcatttatattatatatttgtttaaataaatctaagacagattccggtaattttacagtaatctttttttctctattatccatgttgttgcaccaccaacttcttaattctcgtttttcgtgaaaataattttattctttttaatgctacactcaattcatatttataatcttcataagttatactttcatctaaagttacatcggaattgtaactagcttttatcttgcttaaggcagatttagtacaataaattttattaggatcaaaatgttcaaacgcatatcgaatattcttaggtaattgttataacaacacctttttttcaatttcaaactcaccaaacgtatcatcactaatattttctgatttattaatattataattatccacattcgagttaagactgtgatttgaataatctgaaagatttgatacattaactgaaacgttattatttaacatattactttcattcgtaatgttcaagccactataatcaatattactagagtaagtattactagcgtactattttcgacttatcgacatcctattttttacgtcattgatattactgactttaggcaaactaatatgtaatctatcagccttatcgaaagaacctcttttacatcgaagtaacctacttatttctaactcttttttgatacgagttatttcttgcgttcgcaagatagacatgaagctaattctttatcagttaacacacaataaatattgtcatttttgtctgaaagatgattcttgtaaatactatatttgtaaagtctaagataagatgcataaccattaatgcaatcaaaagatttacttttacaatgtggattgtcaaataaaacttgaggtaaacaatagagattcatctatgtcactggcttggagatactcttaataagatttattgggatataagcgattatactttttatttcaaggacgaatttcttccaataaaccaaacttaataagttatattttccgttaattcattattgaagcacatagaaaattaacctctgtcttctttaataaattgagattggatgccattttaatttacgtttgctttcaataaattatatcgttcaattaaaagagcatacagcaattttattttgccgggagttcattataagtaggatcttcagataagaagtcgtataatttcgtaatccgttatagtttagacatataaattaccctttttcaaatattcattagtaagagatcacgaagtttttgtagttgatataaatataatgggaatatataatatacacgtaactgatattaaagatgtaattacttgcttttgtttacgtcctcttataattgctggtaactacttaaatttaaatgattttataaaattagaaaattttttcaattttatgaaatctttgttagcctttatgattactttgtcaaccgttgttttaactttgactttgtaactgactttgtaattgactctgtgatctcttacctaagaacaactattgataatagtagttgttctttttttgttattttaatacttttctatactggtactatctacgtaaaaataaatcctaaataataaagtttttacacaatctttaattatcattttgattttgctttaatattattctctacgtattgaattgaatgtttaggtatcatgattctaccctctacatcaatcgtatcactatccttactttttctatttactattagtaaaatttcgtaagtatactcttttactaaatacccactaaatgttctaccgtctaataaatgtactttcgtaaatttgttatgaaagaaagtgtaagcatgttttggatagtcataattcttgtagtaatctaatcttgctttatctattgccatctaaatacctccaatgaataaaacaattagtaatctattaaccattataataatccaatcttagttttttctactattatactattggaaaaatattttcctattaactataatgtaattatagcataaagctattcccaaaaagtacttaggaggaaaatttataatgaaaaagaacatagaaaaattgtttgaagaacatgtagacaaatctaaaaataaatcagttaaaatttttactgattgtaagtatttgcttgatgatatgtcctattattcggcaagagtagatgtaaaaagaagtaatatggatttgataagtttagccattatcgagtacgctaaaaatcattatcctgatagctttaacggttggaaaaatggctcattgcctggtcaaagtagtaacaataagtaatttaagactcacaagtatacaaagtattttgtgtatataatttcattgtatacacttagacaaccattaaatgctgatataaaaaaggatgttacgatatgtatgctgtgaagaagatgaatggagaagtccttgaaaaaggtaaaatattattagaattagtaataattttatgcataattttggtgaacactagaagtttttaaagcaattacaagaacgtgatgattatttaacttattttccacataaagcattacttgctaaagcagctaagcaaaccaaatcatttgaaattaatgaaaaatgacagtagtaatcacaaaagattttatgagcaatacaaaatagcgatagaagcaatatatgaaaaattaaaagaaagtggtgaaaaataatgccaaattttcctggggatatagttagaggaattaacagtgagaaaaaagcaattgagtctccttatcaagacgatagtaatttacaaaaactaaagaaacaaaaaaatacttacactacaattaaagtaagtagagagtacaaagaattatttgatgtattagcacataaagcctttagtaagagaatcgactttatcgaagaaattattgagtcgtgggcaaagaataatggtgaacaagaaatactggaaatgtttgcaaaaggacagcttcctaatcgacgcagataagtaatcacttatctgtctttattacaaagtatactaaaaatactttgtatactttgaatacaataagatggagcgattaaactgaataaattggacttaattatactcatagacttaatggttggatcaacaaaagaagaatataaaaatttaaaagagaaaagtttgaaagaaatagaaaaaatctatatcaatgcatatcaacaacaagatgatgaacaaattaatatttgttatgaatagttaattgagtataggaggtataaaatgaaaagttacttaaaatgggttatgaaagattttttaaatgaacatttcattggatttatagttattaaaatatgatagatatttcaagtatgattacaaggaaatagaaatacctcacagaaatgaagaacaactaattttatttgaattaattaattaaaaagcccccctactcaaagggggaagattttaaaatttaacattagaaaaaacgattatttatcctgtatttagtatagcactgtaacagaacttgggaaagagtgtgataatcccccctattgatagggggggatatatatgtgttcaaggagtgcgttattaaacgacctaatatataatctaacatgttttataatgtatatcgacaaataagtgtgtactaacgttttaaagactagataatggttgcacagcaaccacttagataattataaaaattacttaaaataataagtgaggtgaatggtagtgtggaaagtaatatttaaaattattgccatattaatatcgatacacatggtctatgtatcaggaaaaacgatatatgaggttaccctaaatttgatagagtattttagagagaaatttgatgatacgtatattgctgaaccaatcgggctatatatagtttctttaatgtttgtgttctttgcttcactaataatagtattacctttcgtggaatctaaaaatttattactagttgaaatagcaaaaattactttaacaatattaacagtttacactttattcataggtccattattgatgttagttttaatgattttattaaatattcctttagaacaattaactattgtttttgctgttatgagttttataggagtttcatttaaaaaaggaaaagattttgtgatttatatatacaatagaataaacgatgttttgtgaaatgtaagttattttaacaatgtaatactgcagttaaagaaattaaataggtagttgtacagcaactacctagatactaataaaagctaagaaagaggttgattaatacaaataaaaagcatgaatttgtatgttatggtcataattttaaattggtcgaaagcgtcgattgttttggttacatgggtgtttgtgtttatatgaatagtcaatattatggaattttagacacttctgatgcaacttatttttctttaatcgagagtcgtatcaaagctgatccaaactatatctattctatggatgtttaatgttaattaaaagtatacaaagtatgtaatgtgttttaagtatacttggaatacgtaaaaattaaattggaggttttattatggatgagaaattaataatagttgtagaaaattgaatgctgcatctaaaaagtttgaaaaattaactaaagaaaaagatgactataaatctgcttatgaagatgaacaagctaagcatgaaaatacaaggaagtttgtaaaagcggtttgtcacttaggaaaagatatatttggtagtaaaaattatagacgaattattaataaaattgacgataatataaatccaaaatataaagaggcctttagaaatatcattgcgttagatcgagaagttatgattatgtttaaacagaaagacgagaaagtaagaaaacatatagcacttgaagataatgcaacgataaaaacaaagcaagagaaaaataaaggctttgatttagaactataaattagcaaaaaaaagctcttagcagaattcacgaggttgctaagagcgattttcgaatttctatcacaattgctaaacatttttgagtaattctgaggaggagtcgctactcctattactaattatagcaaaaaagagcaattatgccgagaaaacttactgtttggaatgagcgatatgttagctaacagagttagccagttggttccaaacaataaggaaattggaataatgcaataaaaagaaaaggcttagtctaaatagaccaagccttttcatagtcttatattaacaccaaattaaaaaagaagtcgctcacgccccgactaaaatttgtacgcgacgattactaaatagaagattagttgacttcatgtctatatctaatattaaccaatattaaggcgtatttcaagatatatttcgtatagatgacttctcaaaaacgattaagaagttcaggcgtattataggaaattataaattactcttttgttaagttatcattagcttaagaaagaagaaattaaagtttattattagaggcttttaaatgaaaaaaatcacgtagtgtgtagaaatttagtttattagtattctaccgtaaataggttactgtaactagaataacccccttagcaagtacagttaacttaccaaggggctatgctaataattaaagtggtttgtataagtagcaattctcattagtcgtatttcatgtttatattataacatatgtatactgttctgacgataaaataacagttgcaagttaatcttactaacgtttttttagaaaagaaacttcgccgaaaaaattatttgtttacgagttatttgtttagcgggcctatactatatcatgaatgaattattattttgaaaaaataaaaagcctttagtaaactaaataaacttactaaagacttttttaaatgcttaaaatttagaaatctcaaaatagaaacaattgtcaattaagagtacacaaagaatataggtaaactatatcatacataagctattatgccgagaaaatttattgatgttaagagttctaaggctcaatgacaataaaaaattgaaataatgcaataagagtttaggtaagtttttgatcttaaatttgtgaaagagttaaacttccacgaactttttaatatatttttataaatcttttcaaaccctttttaggcattgtttgaaacctagagcgacaaaagatttgagatgttaaaggagtattcttaccacataaaagaagcagttatgatccacaactagagaaagagcgagaagcttttttaaaacaacttgaagtcgactggaaagaataatatgcatactgacatttttaccgataatataaaatgttgtatattgaaatgaacgaaaagtgcgatgtctttcgtacatcacccccccatagcctgccaaagctttgtagggggttctttttatcatttagatttatcatacaaataatttgttgcgatacctgtaagaacataacaaacaataattgttacggcgaaagatgcaatgttcacctgtacatcacacctcttctctgcacaggaagtgccttacaaatataatataacagtcgaatatttgacgaatacatgagtttttcaaaccaaaatatacaaagcattgaatatatacaatatatactctgactacatggtatatattgtatacacatatagcctatataaaaatataaaacaatgaaaatgaatgaaaacacgtcagaacaatgatatataaaacctacttaaataacaatcatagggaaacggcttaaatactgatttgacagagtttaagcattttgagttagttaacataagtaatgattatcagaagtttcatcactataaaaggtgtatcaaggatttataaaccccttgatacaccttttacattcatctttaattaccgaagaatcgactccaaaatccctttttaggtggttctacctccctattatcattaggatcactcttcgtttcttcaacaaacttatcctcttttgtaaattcaccttcgtttgtactgtcattctttttctcttcggatacatccttatgatttatttctttttctattggttggcttttcttttgttgttggttgatattttgagattcttcagtaaaagttgcttcttgcggattaatattttgtctagcattcgctactgtatcaaaagaataattaagctgtctttcttcttctaattgactttctaatttttgaatctttttattactttctaatgctaaaacttgctggttttctagaagtctattaagtgtatttatttgttctttatctctatttgcttgtttcttatatatatctagctgaatatataattgctttattgtttcatctttgactgaatcattattatcataatttttttcatctgttttactttcagcatcaataatcttttttttattttttttaattctatttactactataatttcatcttcactagataaataatttacgttatcgattttttgaaatttcacatttgcctttttagcattgttataaactgtcatctttgtcacattaagttcgtcagcaatttttttcatacttttcatataatagcctccgtataactatatatctgtctcttatacacatctgacgctgccgacgaaggcttaggtgtagatctcggtggtcgccgtatcattaaaaaaaaaaaaagagggagggagggggggggggggggggggatgcaagtgagccggtcgtgcagtgcgggggcgtgagggcaggacacggtgtgtgtggaacggaggggcgatgaggcacgcagggcgtgcgggcattaatgtaacgtcaaaggagcaagctcctcgtctgttcgctcgacttgcatgtattaggcacgccgccagcgttcatcctgagccaggatcaaactctccataaaaatttatgatgtttgattagctcataatactaaatagtgtttgtaacatttaagttactttattggaattaacgttgacatattgtcattcagttttcaatgttcatttgatattaattaaatggtggagactagcgggatcgaaccgctgacctcctgcgtgcaaagcaggcgctctcccagctgagctaagcccccatatttttaaagaagtcgggaagacaggattcgaacctgcgaccccttggtcccaaaccaagtgctctaccaagctgagctacttcccgtatattaaattgataattttaaatggcgcgcccgataggagtcgaacccataacctcttgatccgtagtcaaacgctctatccagttgagctacgggcgctatatttaaattggtgccgaggaccggaatcgaaccggtacggtgatctctcaccgcaggattttaagtcctgtgcgtctgccagttccgccaccccggcaaaataatggagcggaagacgggattcgaacccgcgacccccaccttggcaaggtggtgttctaccactgaactacttccgcatattaaaataaatcgtatgagccatagaggattcgaacctctgaccctctgattaaaagtcagatgctctaccaactgagctaatggctcaaagatggtgccggccagaggacttgaacccccaacctactgattacaagtcagttgctctaccaattgagctaggccggctgaaaagtaaatggtggagaatgacgggttcgaaccgccgaccctctgcttgtaaggcagatgctctcccagctgagctaattctcctatcaagtaagcctggcaacgtcctactctagcggaacgtcagtccaactaccatcggcgctaaggagcttaacttctgtgttcggcatgggaacaggtgtgacctccttgccattgtcaccagacaacaacttacttaaacaagtatattactaattaattaatttttcaatagttaattttacactttattaaaattctttttacaagcgttttacaaaattaactttcgtttttgacgatttttatatcttataataaacaaagtttaatgtcaataagtttttaaagattttttaaattaatttttaaaaaaggatttaatttttgaacactcatagtatactaccacatcatatatataatatctagtccttttttaattaatttttttcattttgtttttcataaaaaagcgttgcttaccttagcaagcaacgcttttaatttatattgatcttatttttgtctcatgtaagggaataataatacatctctaatagatggtgaatctgttaacaacataactaaacgatcaattccaattcctagtccgcctgttggtggcataccgtattcaagcgcttcaatgtaatcttcatccatttcatgagcttcatcgttaccttgttctttttcaacaagttgtgcttcaaaacgttcacgttgatcgattggatcatttaattctgtgaaagcatttgcatgttctctacctacaataaacaactcgaaacgatcagtaaatcttggatcttctggatttttcttagcaagtggagaaatttcaattggatgtccataaataaatgtaggttgaattaatgtttcttcaactttttgttcaaagaattcatttaaaatatgtccatatttcatgttttctgtaatttcgataccatgctctttagctaatgctttagcttcttcatccgttttcacattataaaagtttacacctgtagcctctttaacagcgtctacaatatgaagtcgtttccaatctgattctaagtcaatttcttcgccattatattgcacttttgctgaacctaatacagtttgtgcaatatgtctaaccatagattctgttaaatccataatatcatgataatcggcatatgcttcatataactctatcatagtaaactcaggattatggcgtgttgatacaccttcattacggaatacacgaccaatttcataaactttttctaatccgcctacaattaatcgttttaaatgtaattctatcgcaatacgcatatataacgttgcatctagtgcattatgatgggtaacaaatggtcgagctgcagcaccaccagcgatttgatgcatcattggcgtttctacttctaaataacctctttgatttaaataatttctcatttcttggatgattttactacggttaataaatgtacgagtactatcttggttagtaattaaatctagataacgttggcgatatctttgctcaatatcttgtaaaccatgaaatttatcaggtaatggtcttaaagctttagataataatgtaaatgattttgcttttactgataattcgccagtatttgttttaaacatgacaccttcaatacctacaatgtcacctaaatccgttgttttccaaaggttatcaaaaggttcttcgccaatttgatctttacgtacataaatttgaatttgaccagttaaatcttgtacatgtgcaaatcctgctttacctttaccacgttttgtcattaaacgccctgcaatagaaacatgactttcgtcttctttttcatgtaattcttctttagaaaaatgatcccatttttcttttaattcacttgcagtagctgtgcgttcaaagcgtttaccaaatgggtcaattcctaaatcaataagttcttgtaatttttgtcgacgaacctgcatttggtcattcatttcttctgacattactctctctcctttaatcttcctgttttactattaatggatgttatgtacttattaaaaatattgtaaaatattttccattcactattttatacatagtcacatagttaaattcttaaaatatatttatatcttaagaatttaagcacttatcttagcacttaatctttatatttcttaaccgtatcatctggaaaaactaaatcatgaattttctgatttaatcgtggatcctttttgtccgatgcaatatcgttcaacggtataagtacaaaagcacgttcttgcattcgtgggtgaggtatacttaaattgtctgtttcaataatattatcactatataataagatatctatatctaatgttctaggaccccaacgtatttctcttactcgatgcagttgttgttcaatgtctaaacaatgcttaagcaattgctgaggtgacaactcggtttcaatctctaaacacaaattcaagaaattaggctgatcagtatagccaatcggtgcagtttcatatatcgatgattgttttgttacctttatacccttaatgtttccaattaaatcaattgccttaagaagttgttgttttctatcaccaatattacttcctaaacctaaatatgcttgtaccattaacgattctccctcactatttcaatacccacaccatcgtaatgaccaggtataggtggattttctttagtgattctgactttcgtttccattacacgattatagtgtgaatttatacgttttgcaatacgttcagctagatgctcgattaaattgcaaggtggaccttcaacaatatcttttacatcctcaaatacttcaccataatgcacagtatctttaacattatctgtctgccccgcttttgataagtctacttttaaagttacgtctactaaaaaaatttgacctatttcattctcagctgcgagtgcaccatgatatccataaaacttcatccctttaagaaagatcatgtcgttcattttcattctccttcaaaaaatctataccttgagctaaacgtacatttaattcaacattatgtacgcgaactgcttttatgcctttcattataccataggcagtagtagcagcagtggcctcatctctttctttaggtgtcgtatcagtagaaatcatatctctaataaaacttttacgacttgtcgctaataaaactggatactctgtagcaactaattcatctaatcgagccattacttcatttttttcttttctacttttgggaaatccaattccaggatctaaccatattttatgttttggaatccctgccatttctgctttatttgcttgctttataagtgttaatagcatttcttctacaactggttggtcacgttggccatctccattatgcattaacacaatttccgcttcatatttagcaactacatctaaaatatgaggatcatataacccagcccattggtcattaatcattgtggcccctaatcttagacaagcttcagcaacttcactgcgatatgtatctatggaaatttgtacatttagttttactaattcttctacaactggcactacacgttgcatttcttcttctaaagacacttctgtgtgcccaggtcttgttgatacgcctcctacatcaataatatctacgccttcatcaatcatttctttagcacgtgtaactgcgttatcaattgaattatactgaccaccatctgaaaatgaatcaggcgttacatttaagattcccataatttttgttttacccactatcaatcatcctttgttttaaaaataaatatgtatactcacatgatacactcatttagtctatatttcagtattgttaactaaaagaacctttatactaaaaaatagctggctccgccttttacgaaaccagccatttcttatttaaaacatgatattcaaatatcaacttatatcatcattagtcatcgaatgaatataatggtgtagataagtaacgttcaccattacttggtaatactgttacaactgttttacctttacctaactcttttgctttttcgattgctgcataaattgctgcgcctgaagaaatacctgctaagataccttcttctttagccacacgacgtgatgtttccattgcagtttcattaccaactttaatgatactatcataaatattagtatttaaagtatcaggtacaaagccagcacctaaaccttgtaatttatgtggtccaggttctccaccacttaatacaggagatccttctggttcaattgctacaatttcaacgttaggatatttctcttttaagactttacctacaccagatagtgtaccgccagtaccaacacctgctaagaaagcatcaatttgtttgccttcaaattgttcaactaattcaggaccagttgttaatgcatgtacttcagggttagctggattttcaaattgttgaggttcgaaataaccatgttcttctttcaattctttagctttcttaatagcacctttcattgcttcagatccaggtgttaacactaattccgcaccatatgcttttaataagttgcgacgttcagaactcattgtttcaggcatagtaaatactgctttataacctttagctgcacaaacaaatgctaaaccaataccagtattaccacttgttggttctacaattgtatcaccaggtttaattttcccttctttttcagctttttcaatcattgctaaagcaatacggtcttttacagagccacctggattttgatactctaattttacatatacatctgccgcatcttcatctactacgtttcttaattttactaccggtgtgttgccaataatttgtgtaatattttctacaggtttttgtgccatcgaaaaaacgctcctttaactttctaatttaaaacttagtttttctatcggatataactatattctatcagaattttctaaaaagacaaagatatttctttaaatatgatgtaatattttactttcattagttacatttagttcttcccataaaaaaagagcaataaacatacgtttattgctcatcaacattctactatttttttattgtatcaagtagttcttgaagttcgccttcagaataatgatatttatttccacaaaaatgacacacggcctcagcaccatgatcttctttaatcatatcttcaatttctgcttcacctaaacctttaattgcatttaggaatttttcatgactacaattacattcaaattgtgcatccattgtttccaaaatttgtacattctcttcacctaaaatttcatttaagataccttctggtgttaagccttgttcaatcaatttagaaactggctgcatttggttaattgcattttctaatttagtaatagtttcttctttagcgcctggcatgacttgtataataaatccacccgctgctttaatagaattatcagggttaacaagtacccctaatcccactgatgacggtgtttgttcacttgtcgcaaaataataagtgaaatcttctccaagctcaccagaaacgattggacttgcgcctgagaaataatctttcattcctacatccttaacgacttgaattgcaccctcagtacctactgctcgtcttacatccaatttaccttgatcattaagtggaaaatgggtttgaggatggtcaacatatgcacggacatttccttgtgcatctgcatcagcaataattcgaccaattgggcccttaccatctactgtgacagtaagcttttgatctccttttaacattgcccccattaataacgttgctgtcattgttctccccatcgctgctgaagctgtaggccatgtatagtgacgtgtttggccttcttgaactgattcagttgttaatgcagcatacgcacgtacttctccatcaaaagccaatgatttaacaatataatcatgtgtcattactctaatctctcctttatgttattttatttcgtttgtttcatttattttaaaatctaatattaaatcctttattaagaatatctattttacactgcttatttaagaatatgaagtaacttgctctagggtatataatgctcctatatcatattaaaaactctttcgattaaggttatttaacccgagtcgaaagagtttttatgactaactatgattctctatgatttgaatctgttggatgctctatatttggagattgttcataacctgtttcatctctatcatttcgttgtgaatgattttgagattgattacggtctgaacgatgattgtttctatcatgatcgattctgtcatcttctctgcggtcttctgcttcatctttacgaccttcttcaagttgttcttcacgaatgtcatcataagatttaccatatttaccgtttgagaactcagaatcatctctatcttcatcttttaccactttagctgcatcataatccactgttggtaaaacaccatcatagaataatgaacgtatttgttctgctactagtgtttcttcagttaataatgttttagcaatcagtttcaattgagattcatgttctaataaaatttgtttacaacgttcatattgttctttaataatacgttgaacttctttatcaatttcataagcaatttggcctgaatagttaggttcaccttgcatatctttacctaagaagacttgaccgccaccgcttgtagagaattgtaaaggccctaatttcttactcataccatattcagtgaccattgaacgtgcaatttgtgttgctctttcaaagtcgtttgaagcaccagttgatacttcatggaagttaatatcttcagatacacgaccacctaaaagaccacaaattttatctaacaattctggttctgtcattaagaagcggtcttgtttaggtaacatcattgcgtaaccacctgcttgtccacgaggcacaatcgttactttgtgtacaacttctgcttcatcaagtaccataccaatgactgtatgccctgcttcatgatgtgctacaatattacgttctttatcagaaataacacgagattttttcgctggacccgcaatcactcggtctgttgcttcttcaatatcacgcatatcaattttatttttaccttcacgtgcggcaatcaatgatgcttcgttcaataggttttctaaatcagcaccagagaaaccaggcgttctttgagaaatagcttttaaatcgacagtttcatcaagtggtttgtttttagcatgaacatgaagaatcgcttcacggcctttaacatctggacgacctacttgaatttgtctatcgaaacgaccaggacgtaataatgcagggtctaaaatgtcaggacggttggttgctgcaatcataatgataccttcattctcaccgaaaccatccatttcaactaataattggttaagcgtttgttcacgttcatcgtgaccgccaccaacacctgcaccacgttgacgaccaacagcatcaatttcgtctatgaaaataatacatggtgcatttttcttagcattttcaaataaatcacgtactcgacttgcaccaacacctacaaacatttcaacgaagtcagaaccactgattgagaagaatggagctccagcttcacctgcaacggcacgtgctaataatgttttacctgtacctggtgggcctacaagtaagacacctttaggaattcttgaacccattttcttaaatttcttattatcttttaagaaatctacaatttcaattaactcttgtttttcttcgtctgccccagcaacatctgagaagcgaacacgacgtttttgattgtcgtacatttttgctttggatttaccaaagttcatcatacgacctccaccgccgccaccttgtgcttggctaaggaagaatataaataagaaagcaataattaatacaggaataagcgttgtcaacatactgacaaagacactttgtttttcttcttctttaactgtaaaatctaatcctttttggctacgagcttcacttgttattttttgtaaatctttttcgttattgtataaaatcgttgaagaataatcttcatcatttttagttttaccacttaccaagtacacattttgttcaggttggatttctaaagttttaagatcacctttatccaatttctctacaaactgtgaataggaaagttgtttcggtgtatttccattaccattgatatatgagaaaacaccgaatataataacgccaataattgcgataactagcacattgcgaaaagctttctgcatgcgtcatttcctcctatttctataataaagctaacaaaaattgtaacataatctagcttataaaggctagtatttcaacttttgtagcgcttttctaattctagttaattattttatattcatcatttactcattctttgttttcggctttacatatctatgtatagtcgtttcataaaatgacaattttgaatataaaatgagtctacactaatttatatcgttagtatagttattatatttaaaaatctatctattgtatttgctaatacattataaaattttatttattgtaaatttccggttttaatgtaccaatgtaaggaagatttcgataatgctcagcataatctaaaccatatcctactacaaactcatcaggtatttttttgccaacgtatttggcttcaatatccgctttacgacggttcggtttatctaacaatgtaacgatttctaatgagttaactttgcgtgattgtagtaattcagtaattgattttaaagttgtacctgtttctaaaatatcttcaataataagtacatctttgttttcaatagaagcacttaagtcttttaaaatttgtacttctcctgttgattctgtaccaccgtgataacttgaaacatccataaaatcaattgctaaatgtgtatcaatacgtttaattaaatctgccataaacataactgaacctttaaggataccaacacaaacaagtggtttatctttgtaatctctcgttaattgttcacctaaatctttacaaatttcttggatttcttcttcagttaataaaatatcttttaaatcatctttcatttatgagtcatctccaatttttttaatatctattatatgtttaaagcttgtcgtcacataaagttgtcctatagctatcactcgttgttttgcatctaaaatgatgggtatttgtgtacgttctatgctatcaatttttttatcaataaataaacgacttacttttttatgtccatgactaccatttaacttaaacttatctccatctctacgtgttcgaatcgttagaggccaatctattgctttatcattctcatttggatgaattgtaattaaataatgaccaaattgatatgtataaggatgtgtaacaatttgttcttcaagtagagattgttcataatgagccattattataaatttatcatatgcaatttgaattatccatttttcagtgaggggaattttaatttgagattgtttactctcaatttgttcgaaccattcattataatttttttctgaaaacgatttatttaactgaagcatctcaaataaacgatctagtaaaatcatttttgaaatttcatctagttgattaaaagacgctcgagataattgtatacgttctttattaaggtggatgttaacatgttgttctataaaacaacttattcgttgttgtgtaagttgtaattgtatatcatgccaatgtttcaactttaataattgttccacattgaagtccttattttcatcaatagctggtaaaagtcgattgcgaatgtcatttcttgcatatttattatggtgattagattcatcttcataaaaaggcacatggtgaatggtttgatattgttttatatcatttttatatgtctctatcagaggacgacaaataaaataatgatttcgctcagtacattcattcatccctaatgaattgcgtgttgatcgaccagtaaaaacgcgataaaaaatcgtttcaagttgatcatttaaatgatgagcagttaataacacatcagcatttatcttgctcatcatctcatcaaaccattgataacgtaaatctctcgcttcagattgaatactttttcctttttctactattttagataaatctaactgtttaacataacaggggatttgatgttgcttgcagaattgtttaataaatcgttcttcttcgacagatgcatctctcaaaccatgatttacatgcaagcatgttatagattgatatgaatgtgataagtcatttaataatttatataataaacacatactatcaatccctgtagatactgcaacagctaaatgatccgtctttttccaaagagacgttttcactttcacattactgaacctcctgacttaggctaaataattgatataacgaaaaaagagtgagatagaactttaatttcagttctttatctcacccctggcatagatcttacatgatcttatgcccttaagttattatcaatacatattaatctagaataaatgattggaaccagggctccgttaacttagctatatttattcacacagatataattaacgtctagatcctttaccaccacgtcttgattctgtttgacgtttaatagaagtcaatttgtcttcactgtcttttaagaaattacttaatttcttttcaaaatcttctgctttttgttgaggcggtttattttgattagatttgtgatgtggacgacgaggacgatctttcgcttttttaattgagagactgattttaccatcatctgcaatagataaaacttttacctccacttcatctccaactgataaatgatcttctacattttcaacataattatcagcaacttcactaatatgaactaagccacttttaccttcaggtaattctacaaacgcaccaaattttttgatacctgtcactttaccttttagcttgtttcctacttcgattgacatattctaaataaatcctcccgataatgtttcaattttaaccttattatattcctgttttaaaatttacacaatgctataaaacgattattttaaattaagcgttttactttaatttttaaagttgcctactctttttaattattactagaggatttagaattagacgatgatttatcattaggcaatttaaaaataatttctccattgttacttaaataatagtcatctcgagcaactttctctatataatctttatcgttaagattattaagctcttcttttaatgctatttcctcatcttgtttcttctgaaattgttcttctttatgctttcgttctattgttgcttgattgttactttgtttttggaagacaagcatgatagatagaataataataatcgctaataataatcctccaaaaactgttactcttcgacgaacgacacgcattcgtttttgttgacgttgtttctttcgatttcgttctgaagtatattgattatcaatatgttctacctttttactcataacttgtcacctcctttaaacgtttcaatcatagactacacttcttcagattgtgcagatggttgaactcgttcttctttaatcagttcatacatatttttagcattttcttttgaggcatgttcacttaatccagttactttaaccgttacacgtttttgtccaaaacgaatgactaattcgtcttccacttttacatctgtgccagctttagctacattaccgttaattgttacacgtccttgatcactaatttctttagcaagtgtacgacgttttacaagtcttgatacttttaaatatttatctaatctcatttatcattctccccttgttgtaaataatttttaagggtttcttcattaaaatccttatttttggttttatcatacaatgtcataaaatggtctgcaaatactttctcaaatttcacacgaggtattttaccttcttttgcttttgcattcttccagacatcatttaaatcttctattgtttcaactgttttatctccgaatatgtgaggatgtcgacgaatcattttagcatttaaactttcaataacttctttaatatccatatatccttcttttttaccaatactcgcatgaagtagcacttgtaataagatatctccgagttcttcaatcatatgccaatcatcttcattatctattgcttcaaacaattcaaatgtttcttctaataaataacgtttaagtgattcatgcgtttgcacacgatcccacggacaacctttttcatcatccactagatagtcaataatataaactgcaaaatcaaaatcagtatacatatcttcatcacgcgttattttaggcacaaatacacttgtcagattgttaaacatatcctcattataatctaactcaaataacggtacttctaatactttagcgccttgactattagcacctgtaactatcttcactttaaaatcgtccggataacgttccattaatgtgagtttaacatctgctgcaatcatcgcactatatacttgtgtaatgagagtatgtgttcgaatatttaatgtgttttctttcaaaatagtaccatctaataatgtaaatccatcattagggtcttcatcgattgcgacaaatatatcatctataaaacttttcccacctaaaatctttacatgtatatcatcattatttttattataattaagtaatttagcagtcgtcgtttcagctacacgaggatgtccaggcactacgtaaacagtatcttgtatacgcgtttcttctattaaagtttcaacaatatgttgatacaccgcttcaaattgatcatacttttcgtacacgtcatcaaagcttttaaattcaatgtcactttttaaatctttaataacaggatgttcgagtgtccttgcatatacactctgttgctgtttcaaaaagcgatagacacctaaaggtaaatcatccatactatgattgcctataccaacaatggtaagggtatgcgtcatatctatcttcctttctttatgcgatacagtttatcgccgaatggtaagtgttttaattctttatatcctaaaatattcatatacataacaaggaataggaatatgagaccccctattcctactataattaacaactcaattagacttcctaaacggcctacaggaggtaatagcattcgcaacccctgtatgactactgacattataatgagcgcactcatcaatttaacaataaacgcgcgcatgcgattaaaacgataatatttaacgacctcataatgtaaaatagtaacaaatatcataagcgaaagcactgtgcttatacttgcacctaaaattcccataaagtgaataaaaatcacattaaagataattttaaatagtagtcctgacatcacaccaataaaaatagggcgaatttgattcatcacttgtaaaagtgcgatgtccatcatgataagcgatacaccaattacagtaagcatataaatactaagtgtgaaacttaattgatctgttttgaaaaatacatggttcatcatcggtagtatattaataagacctatacctgctgctacgctaatgagtagtgtgatttttaaagatgcatttgtataacgattcataagaacatgattatgatcagacattgcatctgtaagtaatggaattaggacaaagctaaatgtagttgtcactattaaacctatttgaataaatgaagcacctctatcatagatccctttttgcataatcgcttctctaaatcctaaaccatatgtttgtagtatatgaacgactgtaaaactatctataaattgccataaaataactaataattgacttaatgcaaatacgagagtcgcaagtattagctgtttccaaggaagaggatatgagtgctgatttaattgtaatcggaaaggtcttgttgctaataaatatagactagaacctaaaaatccaagggctgaggctaatattgcaagtgctccagcttgataaatggtccattctttaaacataaacattaaaatagctataataataacacacacacgaatacattgttctattacttgtgaaatagctggtatattcatttgttgtctactttgataaaagcctctaatcacacccaggattcctataaacaaatagctaaaacttgccatttttagcattggtgctaagtgagcatctcccattaacagtgctaatggatgggagaatactaaaatcacactaaaaataataagacctatcatttgaaatcttagaagtgtttttgaaaatacttcagttccactgtgacttccaaatacttgagtgacagcactaggaactgcattcattgatagtatcatacctagcgctacaataggataaatttgttgataggcatataatccagagtcacctaaaatattttgatatggaactcgataaattgcacttaatactttaacaatgactaaagcaagcgttaaaatcactacgccattaaatgctgaatgttgtcgtgaattcttagaagaagatgaaacttcagatgacgatttataattcgtactcaagttccatacttccttcaagacattttactaagaattttaagttttctaaccactgtttagattttgttagagtaatatgcattttaccttctttaacacccaacttcattgttcgtcctaaaggttgagtttgtttaaataattcttcaccatttatctgttctgtacctttagttgaaagaaatacttcaatttgttttcctttatctttaatcaatgtcacgcctgcatgtaaagcatgtattttaatttctaccatttctaataaacgttctacttctacaggataatcattgaagcgatcaagtaattcatctttcacatcaaaaagctgttcttcagtttcaactttacgcaatttcttataaatttctattttagcttgttcattttgaatatactctgctggtaaatacgcgtctaagtgtaattccatttcaacatctggtgcatcaggggtttcttctgtaataccacgtttttcgtttaccgcttcttctaacatttgagaatacaaatcaaaacctactgaatcaatgaatccatgttgttgcttacctaataaattaccggctccacgtatatttaaatcacgcatggcaattttaaatcctgaacctaattcagtgaattctttaatcgcttgtaaacgttcttcagctgtttctgttaatactttattagcagaatgtaagaagtaagcatatccaatacgacttgaacgtccaactctaccacgtaattgataaagttgacttaaaccaaaacgatccgcttcttctatgattaatgtgttcgcattaggcacatcgacacctgtttctataatggttgttgtaactaaaatgtcgtactctccattaataaaactcaacatggtttcttccaaatctcgctctgtcatctgtccatgagcaacagcaatgtttgcttctggcatcaacatttgtaactgttcacgcttttcataaatagactgtactttattgtaaaggtagaatacttgtccatcacgagaaagttcacgttctaaagcctctttaataaaattactattttgctctaatacataggtttgtacagggaagcggttttctggaggtgtttcgatgacagataagtcacgtacaccaagcatactcatatgcaatgttcttggaattggcgtggctgtaagtgtcaatacatctacattggttttcaatgttttaatacgttctttatgacgtacgccaaaacgttgttcttcatcgacaataagtaatcctagatctttatattgaatgtctttactcaatagtttatgtgttccaacaacgatatcaacgtatccagattttagaccttctttagtctctctaacttccttagcagtacggaatcgactaatcaactgaatttctactggaaaatcttgcatccgttcaatcaatgtttcgtagtgttgttgcgctagaatcgttgtaggcactaaaaaggcaacttgtttgccttccatgacagctttaaaggccgcgcgtacagcaacttcagtttttccgtaacccacatctccacatagcaagcgatccattggacgttctttttccatatcttctttaatttcttcaatagatttagcttggtctggtgtaagttcatatgggaagtccatttcgaaatcatgttgctcagccgtatcttcaccatattgataacctactgacatttctcgttctttatatagtgcaataagttcatctgcgatatcttcaacactttgttgtactttggctttcgtttttttccattctgagccgcctagtttatttaatttaggcgatttatcttctgaagcaacatatttttgtacttgatccatttgatcaacaggtacaaaaagttgatcggttcctttatattgtaatttaatataatctctatggacgtctccaacttctagtgtttcaacgcctaaataacgtcccacaccatggtgcacatggacaacataatctccaacatttaaatcttgataagatttaattttttcagcattagaaattgttttagtccgttttcgttgttttttctgtttggttttaaataattctcgttccgtaattacaacaagttgcatataaggcagttcgaaaccttctgatagactaccttctgttacaattgcttgtccactttcaatctctgagtgaatatttgtaacagtaggaatatgcatttcattaagcatcgattgaatacgctcaactttcgtttcagtttctacaagtactacaatagtgtaattattgcttacataacgttgaaattctgaacgcataatgtcatattgtccataaaattgttgcactggcttacatgaaaatttaataatatgttgcaacttcactggcatagacgatgtaaataaagtgaaatatgtgactggataatgattgattaacgtttcaaacccatcatattccataaatgactgcccaataaatccgttaccactttcaattaagttctggataaaatcatctacttcagtagtcaatgtcttttcagtttctttaatacgattatattcatcaactactacaatggcatctttttggaaataatcgattagtgtagaaggtgtgtcatacataaaagcaactagacggcgaagtaattgatgatcaaagaaagtggattcaaataatttaaaactttcatatgtttctttcaaatcatttcgtacagatttatcaattttaggacgtgtttgttcatatgctttttgtaattctgtttgaagatgattaatcacatcttccgtaataatataatcactcgctgtagtgatatctaccttttcaacattatcatttgaacgttgtgtttctacatcaaagtctcgaatcgagtcgacttcagtgtcaaacaattcaattctaactggttgaccgataagggggtaaatatcaatgatgccgcctcgtagagaaaactcaccaatgtgagaaacgacactctcacgtcgatatcccatgtttactagtttatttaaaaattcatccacatcgatatcatcgccaacttctaaagtcatttgatgatgtttccacaattctactggagttaaccattttttcaaaccatttaaaggaacgataaataaccctttcttatcatgagataatgccgttaaagttctaacacgttcactcataagttgtgggctttgagttgaaaattcctctgtcataatatcttggactggatatttataaacttcagaatgatcaatgtattgcaatatatcagtttctaatttatctgcttgatataaattatttgtgattaatagcatttgcttatcatcattcaagtatttttcagcaataatggttgctttggctgagggagataaacctgtaactaaaatattttggttgccaaagacttcgtcaagttcctggaatcgtttgtcattttgaatatagtcagaaataatcgttctcaattgacttctccattatattcattcataacatgatcgaaacgagacgtctcaataaatgcttccactgcttgtgcagcatgttcaattactttttccattgtcatcatttcttcattagaaaatttttgtaatacataatctggaactgacataccattcgttggtctccctactccaatacgaatacgcttaaattgatctgtacctaaatgtttaataatcgatttcattccattatgtccacctgcacttcctttttgacgtagacgaatatgcccttgagataaatccatatcatcgtataaaacgattaaatcttcaacttctacattatagtaatccattaaaggtcctacagcttctcctgataaattcatcatagttattggctcgataaatagcactttatccccatttaaacgttcaatagtataagcgcctttgaatttttgtttatctaatgtaaattgatttttatctaaaatatagtcaatcacttcaaagccaatattgtgtcttgttcgttcaaaacgtttacctatattaccaagacccacaatacatttcatacgttgcaacctccattgtgttcatctttttgattgatttgaacatttaatttaatatgtgtcgattactccttattttataatattactcaatataatacaaaaagagagtaggaaagaaattcaatgatttcgtaacccactcttttataagttatcaaacttcaacttttattttaacattcattttttaaatgtccgatatacataagaaaaagccttctacatatgaaaatgtatcaggctctttctatcaatttaattaaagacattctcacttaaagtgaatacatagtcatcaacgaattattcttcgtctttattttcttcgtcttctttgtcttctttgtcttcaccagctacttcaggttcttcagttgctgattcaccttccattgcttcaatttcttcttcagaaggttcatcagttggaggaactactgtaacaacagattcttctggattgttttcaattgtgaaatcaccagatactttaatatccccaactgaatagctatcatttatttgtaaatcagtgatatctacttcaattgattctgggatattttctggagttgctgtaatttgtaaatcaaataatggttgttcaactacgccgccttctttagcgccaactgcttcaccaactaattgaactggtacatcaacagtacgttcttcagtcatgttaatagctaagaagtcgatatgagtaatttggtttttaagtggatcaaattgataatctgataccataactttaattgttttagaaccaacgcctaaatcaataacaccgttacgtccaacttcacggatgactttgatgaattcaacttcatctactttaactgaagtgtttttagtaccataaccataaacaacagcaggtactttacctgtattacgtaattttttaaggtcagaacgagtttgtttaccttgacgaatgattgactttaatgaagccattcgtatttccacctttcattttcaagttgaaacaataataatatattgtcttaacttctcctcacttgcccatcaatttaaacattgcttgcaagtgtttatttattcgttaaatcacgaacgaataaattatacatggttaaaaataataagtcaaattcatttgtaaattttagtcaaataatacacttactgactcacgttcatatacacgaacaatagcttgtgctattaaaccagctacagataattctttgatgtttgatggtttttgactatcgtcaagtaagattgaatttgtaacaataagttctttaatcgctgaattttcaatacgttcttttgcaggacctgagagtacaggatgtgtacaacaagcatatacatctttcgcacctttatcttttaatgcttgagcagctaaagtaattgttcctgccgtatcaataatgtcatcgataataatagctgtacgtccttcaatttcaccaacgatattcatcacttctgccacatttggtttaggacgacgtttatcaataatagcaatcggagtttttaaaatgtctgctaatttacgtgcgcgtgttaccccgccatgatccggagatacaacaacacattcttctgggttgatgttaggatcattttcaaaatattgtccaataatcggtacgcccattaagtgatcgattggaatatcgaagaaaccttgaatttgtggtgcatgtaagtctaaagcaatcatacgatttgcaccagcagtttcaattaaatttgctactaattttgcagtaattggttcacgactacgcgcttttctatcttggcgcgcataaccataataaggaacaacaatattgatatttgctgcagaggcacgtttacatgcgtcaatcataattagtaattccattaaatgtaagttaactggataagatgtcggttgaatgataaatacatcacaaccacgaatactttcttcaatattaatttgaatttcaccgtcactgaagcgtttaacagaacatttccctaattcgattcctacacgatcagcaacctcttgtgctaatggttcatttccctttaaagaaaaaatctttaaagacgaatttttgtactcattatttaacatttatagtcctccaattttttacttagacaatactattatataaaaaatatatcatttttactatattccactaaaaactgaccaataatatgtttattacgtatcattcaacttagcataatagtaatacattcaaaattttatatttatatatattcatttattccctttaacagaaaaatgacacagtctttttgttcttatattaatctttattttttattgtaaccttctttggttacttgacgtgcgcgtgctaatgctaagctttctttaggaatgtcatctgtaatcgttgatcctgctgcgattaaagcaccatctcctactgttacaggagcaatcaaattcgtgttacaaccaatgaaagcgtcttttccaatgactgttttaaatttattgactccatcataattaacagtgattgaaccacaaccaatatttgtacgttcaccaactttcgcatcgccaatataacttaagtgtgatacttttgcaccatcttttaattctgctttcttaacttctacaaagttacccactttaacttcagcgcctagatttgaaccaggtcttaattgagcaaacggaccaacttttgtcttatttcctacactagaatcattgatgactgattgtataatattaactttgttgccaatacgactgttgttaatttctgaatattggccaacgtgtgtatcttcaccgatgaatgtttttccattgatacgtacgcctggttcaataacagtatccatacctatctctacatctggacctataaatgtagtattggaatcaatgattgtaacaccatttctcatatgatgatgattaatacgatgttgcaacgctttttcagcatgacttaacatgattcgatcatttacacccataatttcatcaaagtcatcagtatgatacacttctgcttttccattatcttctaaaattaaagtaacgacgtcaggtaaataatattcaccctgtgcattatcatttttaacttgtttaagtttttcgaataacgttttattatcaaatgcaaatatacctgagctgatttcattgatgtctttttgagcatttgttgcatctttttcttctacaatgcgattaaggtgatgattttgatcacgtacgattcgcccatacccgaaaggcgtctgagctgtagccgataaaacagtaacttgtgcttgtgtttcttcatggtgtgcaattaaacgttgtaaagtttctgaagtaataagtggtgtatctccacatactactaatgttgtaccttcttgagtatgtaaatgttcttctgccattttaactgcatgtgcagttcctaattgttcattttgataactatataatgactgattacctaatgtctcttttacttgttctgccccgtgacctacgatagtgacgatttgatttacgcccgcttttttaacatttgtcagtacatgttcaaccattggtttaccagcaacctcatgtaacactttatatttctttgatttcattcgtgttccttttccagctgctaatatgattgcatttctttgcatgaataataatcctccaataaaatttgcacttcacaagtaattataatttaacttaacttatagtttcaagatttaacaaattttgtaaacagagtttaattatttgcatcatgcatctaatttttaaaaaatatcgataaaacaataaaaatgggcacgaaacaaaattcaagtttgaatttagagtttcgtgcccacgtcatttagcttacataattaataaaataagcattatcaaaaatatgatttgctttttgttattttaagcttcgtctgattcttctgttacgtctgatgaagcatttttatctggaatcacttcgtcagtttcatcatatactttcatcacagcatcctgtatttcttgtctcatttctgaattgattggatgtgcgatatcgcggaattcaccatctggtgtacgtttgcttggcatagcaacgaaaagacctgagttgccttcgattacgcgtaaatcatgaattacgaaagcttcgtctaatgtgatagaaacgagtgctttcattctgccatctgtttgtatttttctaagtcttacatctgtcactttcatgcagtgagcccccctagtatatatatctttgtgtggttagaagcatgacaatgtgttaattaagtaaattatattcctttaactttacctactaattcaatttcaactttaacgtcttttggtaggcgagacacttctacgcaacttcgcgcaggttgatgctcattaaagtagctaccataaacttcattaatttgttgaaattcattcatatcagaaataaaaatagttgcttttacaacagagtttaaatcagaacctgcttcttcaagtacaacagataaattttctaatacttgttttgtttgttctttcacatcgctacttacgatgtttccttcagtatctaatggaatttgtcctgatgtgaatactaaattattcacgaccattgcatgagaatatggtcctaacgcttcaggtgctttattagtattaattgttttcatgatgtataactccttttaagaaaatttagacaagatattaccaggttcaactttaaattcttgattatattcgtcaacatctgataatttgactaaagaagtataatcctcaatcaatctttgttttacttcttttgattctactagtacagatacccctttcacctctgctttaaactcattcataagattcattacaccatttattgaaccgcctgctctcataaagtcatctacaactaacacatttgagttttcagctaatgtgcgtttcgataagaccatcgtttcaatttttcttgatgagcctgaaacatagttaatggagaccgtagaaccttcagtaactttattgtcttttctaataactactacaggtaaatttaatacgtttgctactgcattggcaagtgatatccctttcgttgcgatagttactactgcatctagtttctcatccatgtaaatactagcaatgagtttccctactttattaagtaatgatgggttaccaactaagtccgataaaaataaatatccacctggtaataagcgctctttttcttgtagcatcgtaatgatttcttctataatttcgattgcttcttctttgctcatcatcggcttataggttacaccgccgcttgcgccagctgttgtaattacagttcccaatttttctttttggaacgtatttttgatgatttgaacgtcttcactaatcgatgacttcgcttgtttaaattttttcacaaaaaaagttaatggaattaactgatttggatggttcattaaatattgtgtcataaagacaatacgttcacttcttttatacctcataagttccagcctttctatcctaataatcttactaaatacacttcgttacaacagccatttacagcattatatactttctttgcttggctctccttttgagcgaatgcatatacagtaggtccactcccactcattagtgctccatcagcaccacaacgcaacatattatttttaatttttttaatttctggatacatagacatagaaacggtttctaaacgattagataaactcttacacaatttcatataatctccctgtctaatcgcttcttcacacatttctgtatgtacatcataatcctcttttaaattaagttctttaaaaatatctggagaagatattccaagattaggttttgctaataccacccatgcagaaggaggcttgtctagaaatttaattttttcgcctctccctttacatatagcagttttattatagatgcaaaatggaatatctgttccaatttgaaggcctaattggcttagtgtttctaaagatgcacctaattcatataaacgattaattcctcgcatcgtagcagcagcatcagctgatcccccagctaatccagcggaaactggaatatctttatcaatcgaaatcgtgacgccttgtttaagatgatatgtttccatcatcagtttagctgcttggtaggcgagatttttatgatcattagtaacatagttatgttctatatctacaacaattttattatcatttcttttctgaaaagacaatctatcattcagatctactgtcgtcattatcatagcaatttcatggtaaccatcatttcttttgaaaagtgtatcgagcgtcaaatttattttggctggtgccgtttcatatatcatttttccgccctctcttcatcaatagtattaaaatgattttaacataaagacttaaaatatttgatagttacattataaattataattaaaagttaacaaattaggagataaatgatcttaatttcaactgcaaatcttgatttatttaaattattattttattaagagtgattaagaattaaaaagagtgttgaacttaaacagcccaacacccaatatacttttaatgatagagtttgtagtacactaaacaactctatatttatatgttcgaatttagtgtgcaactacttcttgatgattatcctcttcaaatgaaacttgtacgttctctgtaagaacatccgtatatgtatacgacactctttcaaaattatgcttatcttgatctaattcaacaataaatactgaaggatatgtctcttttaacactccacaacgttcgattgttttttttcgaccaccgttggctttaagtacaatacgatttcctaaatgacaatcaatagaatttttgatgtccaaaattgattttggcatattgctccacctcgctacagattacataatatcatattttaaagcaatatgtcaaataaaatttaaattttatcaaggtaacgacactttgtcaacaatttaattttctaattctgggaaatttttcttttcttcatacaatcgtgcaaaatcttgtatagaaagcgtttctccacgacgtttaggatcaatatctgcattttgtaaccattgatgaatttgtgatttatattttttaccatctttaaagaaattctgatagttattgttaatcgttttacgtctttgagcaaaagcagcttttgcaagtttaaagaaagcttgttcatcgtctactgaaacaagaggttcctctctttgcatcaattttacaacaatcgagtcaacatttggtggcggcataaacactgatttagggacagtgagtactttactcgtttctgtgtaatattgagtcacaatagataaagaaccatatgcttttgtacctacttctgcatttaaacgctctccaacttctttttgcatcatcactacataaccatcaataggaatatcttgttgcgttaaattaagtaaaatcggagtcgtaatatagtaaggtaaattcgctactaccataattttatcgcaatcatttaaatacgtgttcacagatgcagctatatcagcttttaatatatcttcatttataattgttacattgtcgtagggatgaagtgtttcttttaaaactggaattagacgttgatcgatttcaaatgacaacacttttttagcacttttagcgagttgttctgttaatgagcccataccagggcccacttcaattacgcctgtcgacttatcaatatgacttgcatcaataattttatgaataatattaatatctattaagaaattttgacctaagcttttcttaaaattaaagtcaaattgatttaatagttcttttgttctagaaggtgtagctatatcttttctatccatctttacttattctccttatccattgataatgcacgtcgtacgtcttcttcagtataaccaaaagcatttaatttttttagtaattgtttgccattagaatgtccaatatgcaatttacgtccaagtatctctctcttacgtctcgcatctttaccaataattaaacctaaatcaattaatacacttttatctatcgactcctctccttcctcaaaaggagaactcacatgcattaaggctttctttatatcttcaggatgtgtatgttctatcccaatttttccacgcttatttttcgctttttcacgatcgacataggcatgtttaactcctggtacgtgttcagtaataatatttctaattctatcacctggaaagtcaggatcagttaatacaatcacgcctcttgtttcttgagcattctgaatcactgctaacgtttctctattaatggcacttccatttgtttcaatcgtatcacattccacagctgttttaactcgttctgtgtcatctctgccttcgacaacgataaattcatttattctcatattcatttaccattacctttcacttaatttcatttctattataacggttatactataaaaaatgagaaagatgcacatattatcgtcattcactattagatagcattacgatagatgatgttttacatctttctcatactgaggattattaatttaagttaaataatctttctgcattttctgtagtttgacgacatacctcttcgtatgtcatatcacgtaaatctgcaatttgttgtgcaacaagcgtgacacgttcaggttcattacgttttcctctataaggatgtggagataaataaggtgcatctgtttcaactaataagcgatccattggaacatgtttagcgacctctttaggttgttttgcatttttgaatgtgactggtccgcctaatgacacatagaaattaagtttattaataatgacatctgcaatttcaggtgatgcactaaaactatgcataatgcctccaacttcttctgcatgttcttccattaaaatatctacacaatcttgagttgcttcacgattatgaatgacaataggtaacttaacgcgtttagctaaagcaatttgctttctaaacacttctttttgaacatcagctggagatttatcccaatgataatctaatcccatttctccaataccgataattttaggatgctgagctaatgattcaatccattctaaacgttcttcagtaaaatctattgcatctacaggatgccaaccgataataccataaataaagtcatattcatcaatcagttccatagtacgttcaattgtcttagtatcaaatcccacgacaaacatacggtcaacgcctgcttctcttgcacgagatatcacttcacttaaatcttcatcatattgttcgtcatttaaatgaacatgtgtatctattaacattttatctctcctaacggctatatttattttataattgcaccatttggaattgcactcggtaagcttactaacgttaatactttatctttttcagctgataatatcataccttcagatttgtgccccattaattttgctggctttaggttagttacaacagccacttttttgccaataatatcttctgaacgatagaatttcgcaatacctgaaacaatctgacgttgttctgctcctaaatcaacttgtatttttaataatttatctgatttcggtacattttctgcatcaataacagttgcagctttaatttcaactttatcaaaatctttaatatcaatttgcgatttacttggtacttcttctttatcatcttcactagatttaggtggttgcattgattctttaataaatgcaatttcatcctctgaatctaatcttgggaagatcggagaaggtttttcagtaaccataattggttcttgtaatgcaccataatgctctaaacttgataattcgtataaatctgaattattaatattcaattgtttgaaaatttctttaggcgcatgtgttaagaatgggcgcaataatacagttgcaaaacgaatattttcaactaagtgtgccattacatttcctaacatatctttttgactttcatctttagctaaaacccatggagtggtttcatcgatgtatttatttgttcgacttattaacttccaaactgtagataatgctactgaaaattggaaactttccatattgtcatggaagttcttcacagtttcaagtgctaatgcttccatatcttcatccaattcatgttttggtccttgatatgcagggagctctccttggaaatatttattaatcatagaaatcgtacggttaactaagttacctaaatcatttgctaagtcgaaattagtacgttcaacaaatgcctccggagtaaatacgccgtcagatccgaatggtaattcacgcattaagtaatagcgtgtagcatctaagccataacgatcaataagaacattaggatctactacattacctttagatttactcatttttccatctttcattaaaatccatccgtgcgcgaatacttttttcggtaaaggtaaatcaagagccataagtaagataggccaaataatagaatggaaacgaacaatttcttttgccattaaatgtacatctgctggccaatatttttggaataatgaatcatcatctgataaatatccaagagaagaaatatagtttactaaagcatcaatccatacataaactacatgtttagggttagatggaactcttaccccccaatcaaatgacgtacgtgaaactgctaagtcttctaatcctggtttaataaagttattaatcatttcattttttctagatggaggttgaataaaatcaggattagcatcgtaaaattctaataaacgatctgtatatttattaatattaaagaaataactttcttctttaactaattcaacttcatgtccagaatctggacttttaccacctgcgattttaccattttcgtaaacagggtctacaagttgagattcagtataatacgtttcatcagggacagaataccatccctcatattcaccaagataaatatcaccttgttttaataaacgttcaaatactttttctaccacttgtttatgacgttcttctgtagttctaataaaatcatcatttgagatttccaatttagcccataaacgtttgattccagcaatcatttcatctaaatactctaattctgtttttcctgctttttgcgctttttcttggattttttgaccatgttcgtctgtacctgtaagataacgaacatcatatccttgcatacgtttatatcgtgcaattacatcaccagcaactgtagaatatgcgtgaccgatatgcagattaccactaggataataaataggggttgtaatataaaatgtttctttcgccatcagtagtcctccctttcgttcatgtcttaatgactagttcactttaaattttatctaaatttttaattattttctaatgaatatttaatataacgtttgtgacgacacatcatcataaaacatctatcttattcattataacccatatagaatatacattgtcgtatcttattaacattaccataaattaatattttatggtatttttctatcactatgatacaagtttttattaattttacgatttaatattatgataaatatcataaatctcacttgttttcatctgtcgttcttctgcgactacttttatcgctttcttaggttttaaattttgagtctcaatataatgattaacatgatctataatcgttacatcttcaaaccattgctttgtttcttgagctttggccccctcaattaaaatcacaaattctcccttttgtggaatctcttgattttcaattgcttctaataattgtgatacttcaaacataaccacttgttcaaattttttagtaagttcacgacctactgctacacgtcttcttgaatctactttaataatcgcttttagtgtatcaatcactctaaatggagactcataaatgattaaagtactatcttgatacattcgttgagataaaatattcactttttctttttcttttcgtggcaagaagcctaaaaaagtatatgtaaatgaaggtaaaccacttgccattagtgcagttaatcctgcattaggtcctggaatggtttctacagcaatgttatgtttatgtgcttcaacaacaagttcatatcctggatcgctaattaacggcaaccctgcatctgatacaagcgcaatattattttcttctttaagtaattgaattaaataatctgtctgttgctctttattatgttcatgatatgattttaatggagtagtaatatcatagtggttacataactttttagttactctcgtatcttcacacgcaatgatatctacctgttttaacgtttcgattgctcgaaatgtaatgtcacttaaattacctatcggtgtccctactaagtataaagttgccatattatccctcctcaatcaattttagttttctttgtcttgtaaatgtcttaatttcatattctctacgtaaagcttctgattttgtctcgtacatttcttgatatactaacactaccggacgtcttatttttgtatatttagcacctttcccagcattgtgtttatttatacgtgcctcaatattattcgtataccctgtatataaactgttatcactgcaacgtacgatatatacaaagtgactacccataataaacctctttcatttgctcactatattcgccattttcattgtaaatataaaatggtggtgcaatctctagaccttgattaccattttttcttccttcaacaacaatagtgactgctgatttaccatgcttactataaataaatacaatacgtttaggttcgatattagcttgtctcatttcagttaatacatccataagtcgttcagcacgatgaaccataactagacgtccaccctgttttaataaatgccgtgctgcaaacatgcaatcttctaaactacacataatttcatgtcgtgctattttatgtgcttctttttggtgttgatgaagttgattacgtttaaagtaaggcgggttacaggttattaatgtaaactgagagggtttaaacgtttgatacacatcttttaaatccatattatgcatagataaacgctcttctaatcgattatatttaaagcttcgttgagccatgtctgccaactgttcttgaatttcaatactttctattttttgatgactttttgcagataataataaagcaataacaccatttccggcacacaagtctagaatgctatcattttttcgtactttagtaaaatgtgctaataaaagtgcatcagtagaaaaagaaaacacctcatcattttgaatgatttttaagttctccttaattaaatcatctaatctttcttgttccttcaacatatatgttatctcctaaaaaagagatgtatcacaacacaaaatctgaaattttattgtgttgaaattcatctctcctaaaaattaaaattataccatccatttatcattctttgttatggatttaactatttaaaacattcatgcataataaacaatcttcaccataacgatgtttaccaaataattcgccattacaaatatgaaaaccttcactatacaaaacagctaaattgtctttacttggtaaaggtttttttacatttttaattgcacttttaaagtcattttcatttgattttttattatgttgactttcactattgacttttgttgattcaacatcttgttcacttttagccattagcgcttttaaattatcgttttctacttgtaacgttacattttcttctatcaattgaatagctaaagatttaagttcagtcatctcttgagttaatacattaacgttactttctaattttacaattttttcgaataaatcattgcgattcaaaagaaagacactctccttaattaaatgtagctaattcctccattttatattctaaaggttgctctaaaccatcaatcttcacttgcatcgaaatatctaatatatttaatcctacaacttgtccagtaccttccggtgtatgaatttcatcgcctacatctggtaattgtgcacgagcttcctcataataatcattttcatatttaagacaacacattaaacgtccacatgcaccagaaattttagttggatttaatgataaattttgatcttttgccattttgatagataccggttgaaaatctcctaaaaatgttgaacaacataatgaacgtccacacggtccaattccacctagtagttttgcttcatcacgaacgccaatttgtctaagttcaatacgtgttcttaaattttgagctaatactttcactaactttctaaaatcgatacgatcatcagcagtaaaattaaaaatgactttcgatttatctaaagtatactcacaattcactaagcgcatatctaagtcttgatctttcactaactgtttacataaaattagtgcttgctctgcatcttcttcattttgattgtattgttgtatatcttcttcagttgcaatacgtagaatatcttttaacggtaatgtcacatcttcatcatttacacattttgaagctaactttactatacctatttcaatgcctcgtttagattcgactacaacccagtcttcactgtctaattttaaatcattcggcgcataatattccaatttacctgctttttgaaattgcacacctactacatttggcatttaactcacacctttaattacgatttgttcaaatacgagcatcggattcacattctgtatcaattttttatgtgcttctgtaatttgatcatacattaatatcatttgattaagtgttaatcgtgttgtgtattccttaattagtggtttaagatcagtaaaaatgaaattgttctcaattccgactttagcatgcatcatatcttcaaaaaaagcattgataacagacaaagtaagaagttgtagttttcgatttttagcattttttaacacatcaataacaccaatcaaggccattggtttatttgttaataataattcgcaccaatgaacgattacttttcttaattcaattaaatcatactcttcattaaggtctttggctacctcaatttgtgtcgtatatgaacttaacatttcagcaatagcccgattcataccattatcaacaagtttatcgataaaatgcgatttgtcactcggtttaaaatacatatgttgacatctagagtgaatcgtatttaatatttgttctggtttagtagaaattaaaattgcaatagtattttctggaggttcctctaaaaattttaagatactattttcaccttgaactgttaacttttcaaagtcttctatgatataaactttatatgtaccttcaataggtaattggttcatttggcgtacaagttgttcaatttgttctttttttatagtagattcttcagaggatatatatgtaaaatcaggatgattaaaattacgcaatttcaactcacattgttcatttccattacaaagaataagttgtgcaaattccattgctacatgtttcattgattgtgcatcatcaccttcaaataaataggcatgtgataatttattcgaatgaaaagcattagctaatttttgtaattcctccatatttgcatactccctattcatagttcattttaaaattatatcattaaatttttcagtcgcatttatcatttagcaattaattatgatgtatatgataaagagccgataacataaaaaatatgtttcaggctctttgaaaattatcttttaaaactttatttaattgttaaattaagcttagaatctgtggaatttttctactggcattacaaatactgtagcgcctccaacttcaacttcaacaggataaggtatgtaagagtctgcactaccacccattggcgtcattggtgaaacaagttgatctctattaccacacgtattatcaatgacggttaacgcttcatcaacacgttcatcatctacaccacataagaatgttgtatttcctgctcttaagaagccaccagttgttgctagtttagtagctctaaaattgttttttacgagttggtctgaaagttcttgactatcttgatcttgaacgattgctataatcattttcattttaatacacctctccatattattatatcataagttttttaagtaacttaaaatgatctcatacgtatcacttacgacactttcgatgttttgtgtagcatcaactactttaaaacgctcaggattagttttaattaatgttttatatccctcaattactttttgatgaaaagttagtgtttctttatctaatcgattctgacttctttgattttttagtattcgttctctccccacttcagcatcaatatcaagataaattgttaaatctggataaagtccattaattgcaaattcatttatttttttaacttcttctatacctataccccgtgcatgcccttgatatgctaaagaactgtcaatatatcgatcacataaaactactttattattttttaaagcgggtatcactttttcaaccaaatgttctcttctagatgctgcaaataacaatgcttctgtacgtatatcaatattttcaccatctagtaagatattacgtatttcttcccccgtagatactccacctggttctctagtagaaataacattataattttcagataacaacttattaatctgatttaacactgtagttttcccagaaccttcaggcccttcaaacgttataaatgcagccatattattcatccttaactaatattttatcgtttttaataccttcaacacgtacactatgtgaaagataatattgcatcaattttatcatatttttagtcactttttctcctttccaaaacacaggaattccaggaggataaggcacaatatgttgagctaatactttatcttgtgctttattaatatttatccaatatgcatgattaatatactttgatacataaacacttttttctagcggcaataaaaccggctctagcttttcttttgcttttttaggtaattttatagtttttattctatgcagtaatgtttcgaaaggatatctatcattaaaatgccacaatggtaagacaatgagtatttgataatcatcagctaattcaatataaatatgattcttttcaaaataacgttgtacttcaaaacccgtatgcccatttgctcgaacaataagctttaatggatcctcgacttcaataacttcaaaatgctgttgtcttaacgtttcaataaattgttttcttttttcgaaaaagagactactgtcataagaattataaaattgatgcgctagttcaatgctcgacattactaaataagatggactagaagtttgaaaaatacctaaatatttaataacttcatctttcaaaggtgcatttttatgaataaataatactgatcccatagtaagcgtaggcaaagttttgtgatacgattgaacaacatagtcagcttctgattctaaagctgatttaggaaagtgtttcaaattaaaatgggcaccatgagcctcatcaattaaaacaggtatattgtaatcgtgaaattgtttaacacactgattgatatcaaagcattctccataataatttggataagtaacgacagcgagtttttgatgtcgtaacattttagtatcaatcaaaggcgctaaatactggtaactttcatcacttctgtacataggcaaaatatctgcagactgttgagttaaatctaaagcattaaaaactgatttatgtacattacggctaattagataacgaccttttatatgagtaaatgcttgtataactgataaaatgcctgaagttgtaccattaactaaataataagcatcataattaggatgcttattcacacgattcatactttctaaaatagtatcttctggatgatgtaaatcatctagacccgtgatttcagtcatatccattttcaaagataatgcatctaaataaccgatagtcatatttttatgtcctggaacatgtaatgagatagaatgatgatgaattaaatcatcaagtttttgagtgataggtaatttcaattaagtcctctcctcatatatctttaaatatctcctattttaatagataatttaaaaaaataaaagaaacgctacaacttctgttgtttgatctcttctcaattcattagctccaagcactttttctaaatttcgacataaaaaaagagacctcacggtctcaatatcagctcattgcatccatacaatgatttgcctggcaacgtcctactctagcggaacgtcagtccaactaccatcggcgctaaggagcttaacttctgtgttcggcatgggaacaggtgtgacctccttgccattgtcaccagacaaatgaatgatataagaaaagtaacagctcaacgagctgaaaataatcaaaaaaattataaaaaagacaatttctatattatttcaatagaaattgtcttttttcacttatctagatactttatgtcccggactcttgagtatatttgagtataattgaaagacttattttatattaattggaaaggtttggagtattaaaaatagagagttttattttatattcattaattcgagattatcaaatggataagtgtctgtatttagtgagctatctgagagtttttcattatttaatttaggggacataaatttaattgtttcaacatataattctgtgacaaagtgagtttgtttttccttttcatatttacgagaacgcatttggccagtaatacctactaaagatccttgagaagtatatttttcaatgttgctagccatcttaccaaatgctttacaaaatatataatcacacgctatttcatcattttcatctttataattgcgttcagtagccacactaaacgttgcgattttcacctcctcattatcataaatttttgcatctttagtcatacgaccaacgattactatcttatttaacatgtgtcacctccttatatcgttatattaaatagaattgaatataacgtcaaaaagctatttttttagatttcttccctttttagtattaatatctgatatatttaagaaaaatattaagatatgagacgacttatttaacaaaaaaacaataatcatataatttaaaaatgtttaagagtatgggagacatgttatgaagacttttaaagcagttcgattccaaatagtaagcgatgataacaggatttcagaatttgaactttatgatggtgttattataaataaagaaaatagtggtacaggttggctcctagaaattgtaatttcagatacacattatgatatcatgcaaaaattttatgaatcacaaacagtattagatatcagagtagtgattactagaccttctaacgatccagcattgtttgatgcaacaataaaacatatctctctatttgaaaggaaaatatcaattattttcgagtgtcatatttatacacaccgtcaggtatacgcagaaacactattagaacaacttattgatgaaggattatctggagaagaattaaaaattacatttaacagaatgatgcaatctaaaccgaaattaaaagaagaaaaatttgaaagataaaaatagagtagtaacgaaatgaatgatttcgctactactcttattttaattacgcatcttgaatagcaaaagtaagttcacaactacaagcaagttgtccatcaacagtagcttttgctgtaccttttccaataggacctttaatttttgtaatttcaacttctaacattaaagtatcaccaggtgtcacttgttttttaaatctacatttatcaatcccagcaaataatgcaattttacctttattttcttcactatttaacatagctaccgctccagtttgtgccaaagcttctgtaatgagaacaccaggcataactgcataatcaggaaaatgtccttggaaaaacggttcgtttcctgaaacttgttttaaacctacacaacgctttccttcttcatattcaacaatacgatcaataagtaaaaaaggttgtctatgaggaatgattttttttatttcattataatcaaaaattgtttccataactattacctcaaatctatttaaaaattagtcatcgactcttttgatatctgcaccaagtgattttaacttctcatggaaattaacataaccacgatctaagtgtttaagttctgtcacttgagttgtaccttctgccactaaaccagccaaaataagagctgcggctgctcttaaatccgtagcttttacttgagcaccttgtagttgacttttaccttctattttagcacttctaccttctacattaatattagcattcattcttctaaattctgcaacatgcataaatctattttcaaatactgtttcagttaccactttatggccttcagctgttaataataatgccatcatttgtgattgcatatctgtagggaaacctggatgaggcagtgttttaatatctacaggttgaagttcaccatttgtagtaacatgtacaccttcctcattaaaatcgaggttaactcccatttcttctaatttataaattaaacttgtcatatgttctttaacagcaccttttacaaaaacatctcctcttgtaattgctgctgcgataataagtgtacctgcttcaatacgatcaggtataattgcatgttcaacgcccgttaatttttcaacaccatggatagtaatggtatctgtaccagcaccaacaacgttaccacccatttcattgatataattagctaaatctacaatttcaggttctttagctacattttcgataactgtttttccttgtgctaaagaagcacccattataatattttgagttgcacctacacttggaaaatctagatgaatatttgcacctttcaatccctctttagtgcttgcgtatatatttccgttttctaaatgaatttctgcacctaaggcttcaaaacctttgatatgttgttcaattggacgagcaccaattgcacagccacctggtaatgcaacgattgcatgacctaaacgtgctaataaaggtcccattactaacacacttgctctcattttactcacatattcataaggcgcttcttcatttagtgtagcagaagcatcaactgtaactgatccgttttctttatcataatccactttagcatttaaagtagataaaacattattgatagtaacaacatcacttaaatctggcacattggttaatttactttgtccttcagacgctaataacgatgctgtaaggacaggtaatacagcatttttagctccttctacttgaacttcaccagtaaggcgattgcctccatttataattatcttatccatattaatcctccacattaaactcctatttcttataacatttcccattttgaattacttatttaattagtatatctacatttttagttaattagtagaaattcattttttaaaataaatatttaatttgtgtagaatactgtaataaatccacgataaagttacttactgcagtacccattaaaattgctaagaaaatcatacacacttgcagttgtgttgaatatccttttttaaaaaattgatctaatctgagagaatgtaatgcccagtacgcaatacatatacatattacatgtaaaaatagatgtattattgcaaattgcccaacatattccattcttttctctccttaaagatttctgtaatatattgtacattaaaaaagttaataatgatacataagaacgttacgatatttaataaaagtaactaaaataaaaatttaaagttattatcattctaagttcttttatttacaataaaaaaagagcttgaaacaccattaaatgtctcaaactcttttaatatattaagaataattaactaaaccaataatattttaatatctgttactttttcattaaccattctcactaaattgagataatatattcatcataaatattatcccacatcatttaatttaatcattattttaattcagctacacgcagacggttttccgctctagctaatgcgcgtttagctcggttaatgtcactgttatcctcttcatctaaatgagactgagctctttgacgagccaacttagctctttctacatcaatctcactagctgtttcagctgtttgaacaatgacagatactttatgttgtctaatttcaacaaagccaccactaacagctatatactcagtaccattcttaaacttaactttaatatggcctatctttaatgcggcaactgtcggaatatgtccactcatgatacctatttcgcccgcagtagtttgaaatacaacgagttcaacatcatctttttcgtagactgaaccattaggagtgacaatatcaaggtttactgtgttcattatctttacctcctaattagtttaaacttcaacacccatatctttagctttagcaataacatcatccatacttccaactaaacggaacgcatcctcaggaatatgatcatatttaccatttaagatatctttaaagtccgctacagttgttttaactggaacataagaacctttttgaccagtaaattgttcagccacatggaagttttgtgataagaagaattgaattctacgcgcgcgttctactgttaatttatcttcttcagataattcatccatacctaaaattgcaatgatatcttgtaattctctgtatttttgtaatgtagattgaacttcacgtgcaacttcataatgttcttgtccaacaatagatggttctaaagctctagaagttgaagctaatgggtctaccgcaggataaatacccatttcagttaatttacgttctaagtttgttgttgcatctaaatgcgcgaacgcagttgctggtgctgggtcagtatagtcatcggcaggaacgaatactgcttgaattgaagtgactgaacctttattagtagatgtaatacgttcttgtaattgacccatttcagttgctaatgttggttgataacctacagctgaaggcatacgtcctaataatgctgaaacttcagaaccagcttgagtaaagcggaaaatattgtcaatgaataaaagtacatcttgaccttgttcatcacggaaatattcagccattgtcaatgcagataaagcaacacgcatacgcgcacctggtggctcattcatttgtccaaataccatggcagttttattgataacgccactatcgctcatttcatagtataagtcgttaccttcacgagtacgttcacctacaccagcgaatacagaaataccaccatgttcttgagcgatattattgattaattcttgaattaatacagttttacctacaccggcaccaccgaataaaccaatcttaccacccttaatataaggtgctaataagtctacaactttgatacctgtttcaaggatttctacttcagtagacaattcatcaaaattaggttgacgacgatgaattggatcacgtctaacagaactatctattttttcatttaaatctattgtttctcctaaaacgttaaacacacgtccaagtgtttcttcacctacaggaacactaatatctttaccagtattcacaacttgcataccacgttgaacaccatcagttgaatccattgcaatagtacgaacaacatcatcacctaattgcaatgcaacttctaatgttaatttgaatgtgccatcatttttagggacttcaataattagggcattattaatttcagggacttcattatgttcgaatcgaacatcaattacaggacccataacctgagttacacggccattacccatgttgtttcctcctttaaaatattattcaagtgcggcagaaccaccaacaatttctgtaatttgttgagtgatttcagcttgtctcgctctattatattgtaatgataagtcatcaataagttcagttgcattatcagatgcatttttcattgcagtcatacgtgctgcatgttcactagccttagcatcaagaatcgttccatagattaaactttcaacgtattgtggaagaataactcttaagattgagtctttatctggttcaaattcatatgacgacatttgaccttggccttgactagaatcttcttgagataatggtagaacttgtttaacagaaggtttattttcaagaacactaacatagtggctataataaatcttaagttcatcaatatgttcttcactgaataagtcaatcgcatgcttagcgatagcttgtattgatttaaatgaaggttgatcaggtacatcaacaagtgaactttcaacttcataacctctatttttaaggaaatcaacaccggattgacctaaaacaataatgctatattcatcactatttgtatgtttttctttaatgtcattgactagtcgtttaagcacattcgaactataagcacccgctaatcctttgtcacttgtaataaccaggtaaccactacgttgaatgtgtcttggtcttaacattggatgacttgaatttttacttgcgcctgcaatagcagttatcgcatcttgcattttttccatataaggttcgaattgcttagtatttttttcagctcgacgtaatttagaacttgaaaccatgttcatcgctttagtaatctgtttcatttttttcgtcgatttaatacgactatctatctctttaagagaagccattatctcaccacctttttgatttaaagtttagttattcagacttgctaaaacttttcttaaattcattaatagctgattcaaatttagcatcatcaggaaggttaccagtttctctgatttctcctaataattctgaagcatttgatttagaccaactatttaattcatcttcaaaacgtgtaatgtcttctacaggaatgtcatctaaataaccttttgttaaggcataaataattaacacttgattttcaacaggaagtggtttgttttgatcttgttttaaaacttcaaccgtacgtttaccacgttctaattttctagcagtatattcgtctaaatcagaaccaaattgtgcaaatgattctaactcacgataagatgctaaatctaaacgtaatgtaccggcaacttttttcattgctttaatttgtgctgaaccaccaacacgtgatacagactgaccggcattgatcgcaggtcgtacacctgagaagaataaatcagattgtaagaaaatttgtccgtcagtaattgaaattacgttagttggaacatatgcagagatatctccagcttgtgtttcaatgataggtaaagctgtaattgaaccgccacctaatgcatcgcttaatttagctgctctttctaacaatctactgtgtaagtagaagacgtcccctggatatgcttcacgacctggaggtctgcgtaataataatgataattcacgataagctgctgcttgtttagttaaatcatcatatacaacaagtacattttttccattaaacatgaactcttcacccattgttactcctgaataaggggcaatgtataataatggtgctggttccgctgctgatgcagatacaacaattgtgtagtctaaagcaccagcttgacgtaatttttcaacgtttgcacgtactgttgaatctttttgaccaatagctacataaatacaaattgtatctaaacctttttggtttaaaattgtatcaataccaatcgttgttttacctgtttgtctatcaccaatgattaactcacgttgtccacgaccaattggtactaatgcgtcaatcgctttaataccagtttgtaatggttcatcaactgatttacgatccataacacctgttgctttttgctcaacagggcgtgtcttagttgaattgataggaccttgtccatcaattggttgaccaagtggatttacaacacgtccgataagttcttcacctactggcacttccatgatacggccagtacgtttaacttcgtcgccttctctaatttcactataaggtcctaagattacgacacccacatttgattcttcaaggttttgtgctaaaccaagcactccatttgaaaactctacaagctcaccagccatacaatcatttaatccgtgaattaatgcaataccatcaccaatttgaaggacggtacctacatcatcaacagacatttctgactcatagttttcaatttgtgagcgaagtaatgcactgatttcttcagctttgatggccatctatgtcactcctcttttttaattaactcttttaaatttacgctctatttgttctaaatcattttttatactgccatctaatacagtagtcccaacttttgctctaaaaccgccaattaagttaggatttattttagttgtaatatgtactttagacaatttagttttgttaagaattacactttcaatacgagataattcttcttcattcaattgatatacagattcaaccaaagcatcaccttgattataatgatggtcatacaaatgtttaaattctttaaagatagaatggataagcgctaaatgacgattatttgctaaaatcattagcatattttttaagtaatagttcgcatccccaaatacaatacctgcgaatttacgtcgttcagaagcaggctgattaggatttgaatcaattgcttttaaatcatcaatgtaatttaaagttgcatgactaacttcttgtaattcttcatacattaaatctaatcgatctttatctatagagacatcaaataaagctttagcatatttttttgctacatctgccattatttatcgcctgcctctttaagatacttatcaacgagacctttttgatcttgttctgaaatttctttttgtaaaactttagaagctattaaaacagataactcagaaacttgattattaatatctgcaagagcgcgttctttttcactgttgatttcactttgtgctgtttcaatcataccgtttgcacgttcatgtgcatctttaataatttcttcatgttgtttacgtgcttgaattcttgcatcttcaagaatatgatgaacttcatcttgtgtttctttaagtgtctttttattttcttcttcaagtttttgtgcattcaattttgcttcttcagcttcgtcaatatctctattaatatcgcgttcacgtttatccattacttcttttaatggaccccaagcaaattttttcaataacgccaataggataataaatgtaaaaattgtaacaatagttgttccccattgaacgccacctgcagttgcacctaaaacaaatgaattggttaatgcattcactggcatttgacactcctttcattattaatcatcactttgccactaaataaaacgaatggcgaagatcaaagagacttcgcctcgaacatttcttatctgaataatgtcatgaatgagataacaacgccgatgattggtaatgcttcaactaaaccaataccaatgaacataatactcattaattgaccacgtgcttctggctgacgtgctacaccttcaactgttcttgaaacaataagaccgttaccgataccagcacctaatgctgataaaccgattgcaattgctgctgcgattaaacccatattaataattcctcctaaaatgtttgtttatgttaatgtgcgtccgcaactttatgggacatgtaaaccatagatagcataataaagatatatgcttggattgtaccgacaaagattgagaatccttgccatataattaagccaggaatactaattatccagccccagccgttttggaaaaacaggccagctaatagtgataatagtaactcaccagcaaaaatattaccgtaaagacgtaaacctagtgttaatgttgaagagaattcttcaaagacattaataattgctaatggccagaaaggtttaaagtaattaccaacatatgcttttgttccacgcattttaacaccatagtaatgtgttaataaaatcatcatcgtagataacgtcaacgttacagtcgcgtcagcagttggagatttccaccataaataatgatcatgtgtaacaattgcaaatggtaaacctagcatattggcaacaaaaataaataaaattaatgttaccgccaagaagtgaaattgaccaccttttttccaagccatgttactctcaataatgcctcttacaaaatcgaaaatccattcgataaagttttgtttgccactaggtcttttcttaagattacgcgtacaaacaatagctattataaaaacaataatagcagtaataataagcatcataatacttgctaagttgaaaacaatatcaaatccaaacacattccaacttacgagtggggatttgtgatccatgtactcacctctttctgtatatagtttactattttagcaagagagggcgaaaaatgattaatacataagaaatcataaggcctatcattataccaatgatatttacattctctttaaagacaacccatactatacatgcaataattgcgactaagtatctccatacattacctgtagaaatatgtatattatctggttgttttgccctagaaagatatatctcaaaaatgtatgtgttgattagagacccaagtgtcccaattattaagcctaataaaaaagaattagatttaataaaatacaaaatacttaacaatattaaaaaataaatgtaatattgaatgaattgtctaaatatgatgctgaaccgtttcattctttgtgcctccaaaacttatgacaatcatggaaaccgttccactcatacaatttcaataataatatagggtaatttatgtgtcaattctattcaaattgttgtttaatttaacaccaatattgtcataaaatgttcacaaataaatcaacaattttttaacttttcaaattctttaggtatttcttcagttaatcctaaatagtatttaatactatcacatatacgttcagatgcctttccatctccataaggattttgagcataggccatattattataaacttgtttgttctttaataattttcttatttcttgatacacatgtgtatactctgttccaattacttttaatgttccagcttctacaccttcaggtctttcagttacatctctaagaactaaaactggtttatttaatgatggtgcttcttcttgaatgcctccagaatcagtcaaaattaaataagcatgattagcaaaattatgaaaatcgacaacatctaatggttcaataagctctatccttggatgattttctaaataagcgtatgatagttttctaacttcgggattcatatgtaaaggaaaaactactacaacgtcttcaatatcttcaacgatatctctaactgctttgaaaatatgttccataggttttccaatattctctctacgatgaacggtcagcaatacaatttttttatttttatgcttttctatcaactcagaagtataatttttattaattgtaaaatttagtgtatcaatggcagtattgccagtaatcactatagatgtcttatctttattttcttgaattagattgcgttttgcaccaatagtaggagcaaagtgtaaatcggcaatgttactaaccatctgccgatttatttcttctggaaaaggcgcatatttattcccacttctaagaccagcttctacgtggcctacagaggtatgattataaaatgctgctaatgcgccagaaaaagtagttgttgtatcaccatgaacaagtaccatatctggacattcttttttcataatttgctcaagttgaataatagatttagctgttatttctgaaagagtttgcccttttttcataatattcaaatcataatgtggttttatgttgaatgtttttaaaactgaatcaagcatttctctatgttgagcagttacaacaataattggttctagcattgaatctttttcaagtgctttaactaaaggtgccattttaattgcttccggtcttgtaccaaagactgtcataatctttctcataatatttactcctatagtactatttagtaccaaataatctatccccagcatctcctaaaccaggtgtaatatatgctttttcattaagtttttcatctaaagctgcaatatagatatcaacatcttcatgcgcttcttgcattttttcaacaccctcaggtgcggcaattaaacacataaaacgaatattctttgcacctcgattttttagtgaattgattgcttcgattgctgaagcgcctgtagctaacattggatcaactactataatttcacgttcatcgatatcttgaggtaatttagcaaaatattctactgcttttaatgttttaggatcacgatacaaaccaatatgtcctacacgagcagctggaactaagcttaatacaccatctgtcatccctaatcctgctcttaaaataggtacaattgctaatttttttccagctaatcgttttgctgtcatagttgttacaggtgtttcaatttctacatcttgcaattgtaaatctcttgtaacttcatatgccattagcatacctacttcatcaacaagctctctaaattcttttgttccagtatttttatcacgaatgtaactcaatttatgttgaatgagtgggtgatcaaatacatgtactttactcataattcatttcctccatttatgttgttattcatatagcggatattgttgagtcaattgttttactctatcactagcttctttcaattttgcttggtcatttgaattttttaatgctgtactgataattaaagcaacttctttaaatgctacttcatcaaaaccacgcgtcgttgcagcaggagtgcctagtctaattccacttgtaacgaatggtttctcctgatcaaaaggtattgtatttttattacatgtaataccaattgaatctaatgtttcttcagcctgtttacccgttaaattaactgattgtttcacatctactgaaattagatgattatctgtacctcctgaaacaattctaaatccttcattttgaagtgtttcagctaaagttttagcatttttaatgacttgttcttgatacactttgaaatctggttctaaagcttctccaaaagcaacagcttttgcagcaatcacatgttctagtggtccaccttgaattccaggaaatattgtcttatctatctcttttttatacttttccttgcaaagaatcaggcctccacgtggtcctctcaacgttttatgagttgtactggtaacaaagtcagcatattctacaggattaggatgtaatccagttgctactaaacctgcaatgtgtgccatatcaaccattaatttagcaccaacttcatcagcaatttctttaaatttcttaaaatctaattgtctagaatacgctgacgtaccagctacaattaatttaggcttatgtttctgtgccaattcacgaatttcatcataattaattctttcagtttctttatctacgccataatcgataaagttataaaacttaccactaaaattaactgaagcaccgtgagttaaatgaccaccatgacttaaattcattccaagcacagtatctcccatctctaaagcaactaaatacactgccatattagcttgagaacctgaatggggttgtacatttgcatgttcagctccgaataaagctttgatacgttcaatagctattgtttccgtaacatcaacatattcacaaccaccatagtaacgacgacctggatagccttctgcatatttatttgtcattacagatccttgcgcttccattaccgcttctgaaacgaagttctctgaagcaatgagctcaatattattgttttgacggttgtattcattttgaatcgcttcataaataatgtgatcttgttctttaatataagacatatattccccttcttcctttagaacttattcatatttagctctttctccaccaattttttttggtcttgaagtagcgattgtaactgtagcttcaccaacttttttaacgcttgttctcaacggaacacaaacatgattaatgtgcattccaataagcgtttgaccaatatcaatacctttaggcacttttatatattcaatgactattggatctttcatatgttgataggcatatgtagcaagacttcctcctgcatgaacatctggtacaacagttacttcttccatagtaaatggattataatcttcacgctcaattgtaatcgccctattaatatgttcacaaccttgaaacgcaaatgaaacgcccgtttcacgttttatacgttccaattcattaaaaatagtttcagcaacttccattgaaccaactgacccaattttttccccaattacttcagaagttgaacatcctatcacacaaatctcatcttttttgaaaaacgattgagttttcaattcatccagtaaagttgtaagttcttgcatattatttcacctcacttacaaagataaaaagaagcatagctgacaagctatacttctttattataacttatttattactcaacttatactattagcgtaatatttctctttattcttcgtgtttcaatttgctaataagagaatataattgattaaatgtgtgacgataggtatctatgctaccgccaaatggatcatctatttcacctgtttctgatacatactcacataatgtataaataggatattctgtcccaaattgactgattaactgtcgtttatgactattggtcatcgttaaaattaaatcactttttaagtcatcttgactgaatatttgagatacagagggttctggtaaattattttctaaaataacttctaatgcttcaggagtaatggattgtccattcattgcaaataatccacgtgattgaatagaatcgttaggtagaagcgctgtagctatactttcagcaataggacttctacaagtatttccagtacatacaaatattatcttcataattctcttcctttaactatttgatttcccgttgcttttagcatacgattcataactgcttcagaaccttcaatattatcaaaagtataaataaatgctttttttattcgttcatcatcatcaatgtcatgtaaaattttatataagttatgattagcccctttaacatctcttcgattttcacaaagagagataaatataccatctttaggtacatactttttcatactagaaggtaaaacaaatgctaaccctgattcatttaactcagaaataggttgtgtcaattcagttaacatatatacaggtgttttaggtgcatagtgtttatatttcatacctggtgctatgggacgttctaattgattataatcatattgaatgacgctgtgaggtaccacctgattaagcattgtttgagtaattgatcctggtcttgctattctaaaaggaaattgggtacaatctaaaactgtactctccaagccttcttcactttgatcgccattcacaataccatctatttttccatttaaatcattataaacatgttgaaatgtcgttggagaaggtcttccacttatatttgcactgggtgctgcgattggtaaatcaacatattctaatattgctcttccaattggatgacttggcattcttacagcaatagaattaagaccacctgtcactttctcacataaatatccttgttttaaaggaagaataaacgagattgggccaggccaaaatgcattcattaatttcttagcttccttagggatagttgatacaaatgcatccatttgtgattgcttgtaaatatgaacaatcagtgggttatcagacgggcgtcctttggctttataaatgttttctactgcctgttcatttttagcattggcacctaaaccgtacactgtttcagtaggtatcgcaattaggccaccattttcataaatagtttttatttctgctaattgagaaaacgtgtggggatcttgactataatctttcatattccatatatttgttttcactttgatcacacctttcacatatgtgaaattattaaagaaaaagaagtgggttagaaaataatacatttctttcccactccactattaccacttaaatgaaatcattctatttaatccgttaatatctttcaagagatttacattcacatgcggatatttatttataatacgtgcttttaatatttctccttgattatatccaatttcaaaagttacataagcccctttattaagtacttttggtaaatcatctagaatcatctcataaatttcatacccttcatcctcagcaaataacgcgatatgaggttcatactttactaccgtatcttccatatctttcatctcagtttgatcaatataaggagggtttgaaattaagccatctaatttaatattttctttaataagtggtttaagggcgttaccttttagaaatctgatatccgtttttaattgatgtgcattatcagatgctacctctagagtatcttcaataagatctgtggctattacatttaaggttggatttagttttttaagtacaattgcaatcgctccactgcctgttcctatatcagcaattgtacttccatctttacaatgctctaaaaaatgaagcataacttcttctgtttctggacgtggaataagacattgagaatttacttgtaattgatatccataaaatgattgaaaaccaacaatatattgaataggctctcctaataacatacggtctaatgcaagtgaaaattttgcttcttcagcttgagacatctcatcatacatatgcattaaataatcagtcctagaccatttaaataagtctaacatcagccattccgctctagattgctcaaatcctttttcttttgttaattcaatcgcttcttgtaaggtatctttaaagctcgccattatttagttctttcagtttttcagtttgctcagaaagtgttaatgcatcaataatttcatccaatttaccttccataatttggtcgagcttttgtaaagttaaaccaattcgatgatctgtcacacgactttgaggataattataagttcgtacacgttcagaacgatctcctgtccctacagctgatttacgttgagctgcatacttttgctgttcttcttgtaatttcatatcatataatcgtgcttttaatacttttaatgctttttcacggttttgaatttgtgatttttctgaagacgttgcaataataccggttggaatatgtgtaatacgcacagcagagtctgtagtattaacgtgttgaccaccagcaccacttgaacgatacgtatcaattttcaaatcttcattacgcacttcaatttctacatcttcaacttcaggtaatacagctacagtcgctgtagatgtatgaatacgtcctccagattctgtttcgggcacacgttgtacacgatgagcaccattttcaaatttcaacttactataggcaccactacctgaaactgaaaaactgatttctttatatccaccatgatcactttctgccgcttcaacaatttcagttttaaaattttgagattccgcatattttgtatacattcttaataaatcgcctgcgaaaatagctgcttcatctccaccagctgctgctctaatttcgacaataacgtctttttcatcgtttggatctttaggaattaacaagaatttaagttgttcttctaattcaggaagttcactttttaatccagatgcttcttcttttaacatttcaatttcttctttatcatctgtttcagttagcatttcatctatttctgctacttcttcttttttacttttgtaatctctataaacatctactgttttctgtaaatcagcttgctctttagaatattttcgtaatttatctggatcgttgacgatttctggatcacttaacatttcatttaactgttcatatctttcctcaacaatatctaattgatcaaacattatatttcctccttgtcattgatgctaggtgctacaatatgatgtgctctgcatcttggctcataactttcatttgctcctactaatataattgggtcatcaattcttgctggttgtccatcgattaaacgttgcgtccgacttgatgacgaaccacatactgcacaaacggcttgtaatttggtcacttgttcacttacagccataatttgaggcatggggtcaaaaggttcacctctaaagtccatgtctaaacctgctactacaactctatgaccctcttcagctagcttttctactatatgtacaatttcattatcaaaaaattgaatttcatctatccctatgacatcaaattgagataaattttgtaatagtatttctctagctgttgaaatattaatggcttctagttcattaccatcatgtgatacaactttttctttatgataccggtcatcaatagccggtttaaatacgattactttttgtttagcataaattcctcttcttaatcgacgaattaattcttccgatttaccactaaacatacttccagtaatgcattcaatccaaccagaatggtaagtttcatacattataagttccacctttttcaaaacataatcgcttaattatatcatattttcgtttattataaatgagtttattactgggttatcattgaacaaatgaataaaatagtttagaaataaaaaaatacctgcttaattctatacataatagattaggcaggcattttaagttcaaaattaattgttgtttgatttgagaccaaactttttgttgaaacgttccacacgaccatccgcagcagcgaatttttgacgtcctgtgtagaatggatgtgaatcagatgatacatctaagcgaataactgggtattcgttaccatcttcccattccattgtttctgaagaagttttagtagaaccacttaagaatttaaagttagttgttgtatctaaaaagatgactttgtggtaatcaggatgaattccttgtttcatttttttcagctcctttgccctgaaccatctggaacagagttatttgtgagtttttacccaatactgtgtaattataatagttattgaaggaaaacgcaaccctcaatcatatattttagataattggttttcctgtttttgtactttcagcggctgccttttgcaattgttcaaaaaattctttgttattttctgaacgttttaattttcttataaaacgctctgtaaaatcggtagaatcagtaaacatatttctaagttgccataatgagtctaattcggacttgctaattaataattcttctttacgtgtagaactacgtccaatatcaatagctgggaatattcgacgttcggataatttacgatcaagatgaagttccatattacctgtacctttgaactcttcataaatcatatcatccatacgtgaacctgtatctactaaagctgttgctaaaatagttaggctaccacctgcttcaatattacgcgcagcaccgaaaaatgctttaggcttatgtaaggatgctggatccaaaccacctgacaatgttctaccactaggcgggataacaagattatatgctcttgctaaacgcgtaatagagtccatcaagataatgacatcttgtcctatctctacaagacgttttgctctttctagtaataactctgctaccttaacgtggtgttgaggaggttcatcaaaagtggaatgtactacttctgctgactctactgaacgctctatatcagttacctcttcaggtcgttcacctactaataatataaataatttagcatctggtttatttgtactaattgcatttgcaatttctttaagtaatgacgttttaccagctttaggaggagcaacaataagaccacgttgacctaaaccaattggagtaactaaatccataattcgagtagaatagttttgaggctctgtttcaagaataattctttcctctgggtataacggagtaagtgcttggaaatgaggacgtttttttacaacttctgcattttcatcattaacaaagtcaacttgtagaagtccatagtatttttcattgtctttaggctttcgtacttttccagttactttatcgcctcgtttaatttcaaaacgtctaatttgactcgctgatatatatatatctttttcacctttagaataattaacggttcttaagaaaccatatccatcaggttgtatatcatctaaaacaccctccatatagtaatttccatctttttccatttgagcttccataattgccaagacaagctcacttttattcaatttactataattagttagttttaatgattttgctttttgcgtaagttcttttgtcgtataatttttatacaattcatgaaaagattcatattgtggtgatgttcgttctctttcaggcataaattgcacccatttcttatatttttataaaaatcatctagctactagcattgtcaaatcatctaaatgattataacttaaatgttttaaacgttagcatcttaaatactagaattaatatagcaaatttttaatttaattacaaaatgattttattaaatttcaaaaaataaaacagctcatggaactaaaacgattccatgaactgtatttatattaaaatatttcattatacttaattatttaaaataaccagcaattgattttacttctaagaactcttcaattccgtagtcgccccattcacgaccgataccagattgtttataaccaccaaatggtaaataaggttcgtttggagattcattaatttgaattctacctgcctcaattgaacgtgctactttttgaagcgtttctttatctttaccaattacatatcctgctaaaccatatttagtatcattagcaatttcgattgcttcgtctaaatcattatatgtgattactgaaacaactggaccaaaaatttcttcttgtgcaatagtcatatcatttttaacatttacaaaaatagttggtctagcaaaataacctgtatctaatccttctggtttacctggaccgccatataataattcagcgccttcttcaatacctttatcaatataagattgtactgtgtcgaattgttttttactaatgattggtcctacttgagtatttttatcaagtggatcgccaactttaacattactaaactcttcttttaaggcagttaagaattcttgtttaatactttctggaactaagattcttgttcctgcagtacatacttgaccagtattattaacaacctttccagttgtagcttttgcagcttctttaatatctacatcgtcaagtacgatatatggtgatttgccacctaattcaagagatacttttttgatatctttagctgctttttccataattttagaacctgtagctccagaaccagtgaatgacatcattctaactttaggatgttcgcttaatggattacctacaccttcaccatcaccattaactaagttaaatacacctttaggaacgcctgctttttcaaagatttcagctaaaattattgcagcaaatggtgtttcttcagaaggttttaacacaactggactacctgcagcaaatgctgctgctaatttaagagatgtttgattagttgggaaattccatggtgtaactaatccagaaacgccaatcgcttctttagttaccaaatcatctccacgacgttcttcaaattcaaatgaatctaaagctctacgtgcttctgaaaagtgttgtaaacccatttgataatgaacattttctgaaacagttagtggagcgcctaactctgctgtaattgtttcaataatatcttgttttctatttttatattcttctactattctatctagtagttgttttctttcttcaactgaactatggcgaaattctaaatatacgtcatgagcagcttgaaccgctttttctacgtctttttcattaccttttgcaacttttccaataacttcttctgttgctggattaattacatcaattgtttcgttactttcactatcaatccattcaccattaatatattgttgagtataatttctcatcaatgattcactccttaagaatgtgtatgtctaatatatatccgatttgatgttatttaaacataattaaaaggttaaagtttatataaactccaaccttttaactatattatttaactgaatcgttatgttctaatgtgacgtaatctctagcccatgcttcaattggtcttaaagcctcagcaagtgcttttcctttatcggttaactcataaacgatagaaacaggacgtgtagaaatgacttttttgtctactaattcccactcacctaattctgtaagcttaatacttaatgcacgtggagtaattgtttttaaatcccttttcatatcggaaaagtgtgcagtataatcagcgcatcgagataggtaattaatgattaaaccgttccaacttctaccaacaattttaaaggtttcttcgagatatggacagatttccattgtcttcacctctattcaaaacttcttaaatattgcaggtatttaatatacttcagcaattaatatatttaagtatatcaaaaataattaaacttgttcagtccaaatatccgcacctaaatctttaagatgtttaacgatatctgtatatcctctataaatatgtttaacattataaattgttgtaacaccttctgctagtaatccagcaataatcaagcaagctcctgcacgtagatcactcgcatatactttggcaccttgaagtttagaaggtttaattgttgcagtaccagtagacgtatctgcttcaatactagctcccatatttttgagctcttctacatggcggaaacgagctggatatatcgtttctgtaacgaaagatggaccatctgtcataaataataaaggcgtaataggttgttgtaagtcagtagcaaatccaggatatactaatgttttaatatctacatttttatatgatgatttacctttaattactatttgttctttatcatcatcgatatcaatatcaacacctaattcatttagtttaactgtgagcgcttctaaatgtttaggtacaatatttttaattgttacttcgtcaccacaagcagcggcaatacacatatacgttcccgcttcaattctatcaggaatcacttgatattcagttccatgtaactcttcaacaccactgatttttagagtactcgtaccggcgcctttgatatttgcgcctaagctatttaaaaagtttgctacatctactacttctggttctttggcagcattttcaatcgttgtttgcccttttgcatgaacagctgcaagcataatgttgatggttgcaccaacacttaccatatctaaaaagatgttggctccgtgcaattcttttgcttctattttcattgatgtatcacttgattcatcaatttcagcacctaaagctttaaatcctttaatgtgttgatcaattggacgtgggcccaatggacaaccacctggtaaaccaatcacacattttttaaagcgacctaacatggctcccatcatgtaataagaagcacgtaaagattcaactttgttatttggtaacggtgcatttttaatgtctgttgtatcaacttctaatgttttaccattaagatttgttttaatatttaaatcttctaataaactcactagtgttttaacatctgagatttgcggtaaaccgtcaattttcacttgtccttgcgctaatagagtagctggaataatagctacggcactattttttgcaccactaattgtaacttcaccctttagtggttgaccacctcggattttaattacttcttgactcatttattttttctcctttattcgccttttgtaaaattatacataattcgcattataaattatatattatttatttgtaaaacactaacttttaaaaaaacttagcaattataatattaatatccaaaaatctaatatttcatataacggattgataacactattataaatcaatttatacaattatttaattctgttttttcataaattttaaaaagagataatttattttttataaatcatgagtcagtaattgattaacactcagcatgactaactttatacaaatactttaataatatatcgtaaaatttttgtataaaataaaaaaactgtcaacaaagcgaacactttgctgacagttcaggttgccttaacctttaataataattattttatttagcgcgattagacgtaccaaactctctaattttgccttttactgtttctttaatagcttcacgtgctggacctaagtatttgcgaggatcgtaaacttctttatcattgttcaatacatctctaacagctttagctgaagcaatttgattttcagtatttacattaatttttgcagtaccataagggattgctttttgaatatctttagttggaatacctgtaccaccatgtaaaacaagtggtaatccagttgatgcaccaatttcttccatttctttgaagcctaatttaggttcgcctttataaggaccatgtactgaacctaatgctggtgctaaagtatcaataccagttctttcgactaattcttgacattctttaggatcggcatagatgataccgcctacaacatcatcttcttgtccacccactgttcctaattcagcttcaactgacacgccatgttgatgtgcatattctactactttagaagtaatttcaatattttcttcaaatgggctatgtgaagcatcaatcattactgaagtaaatccagcatcaatagcttctttacatttttcaaaacttgaaccatgatctaggtggatagctactggtatagtaatgtttaaatcatgcattaaaccttctaccattttaactactgtataaaaaccactcatataacgtgcagcaccttcggaaacacctaagatcactggcgcgttctcttcttgagaagcttctaaaatagcttgtgtaaattctaagttatttaagttgtattgaccaaccgcataaccattttctttcgcatcgattaacatttctttcattgaaactaatggcatgaaagttcctccttgtatccaattacataaattttcaaaaattattatagcagataatattttttattgcatgcttaatttaaaaataattgataacttttgaggcttcattgcataaaatattatatttcattacaatactaatgaaatggaggataatcatgtcaaagatactacaaacacaattaacgggtatatttaatcgtttagaagaccaagcgttagacatacaaatggctgctcaatgtttaatccaagctattggtggagaaggatatgtatatattaatggttatggaaatttaaaattttttgaaacttttatattagacagtgatgaaaaattaaattctagtaaaaaattgagcgaattaaacagtttaaatgatttagacacaactgatcgtgtatttttattctctcctttttatactaaggaggttgctcaagatgttcaacaattaatagacaaagatattgattttgtattagtatgtaatcgtcctaaacaagaagatttccctgaacatcttatgcattttgtaaacttatcaactccgcgtccgattgtatatactgaggattatgataaaattgtacaacctcatacaatggcgtttaattacatttactatgatatatatacacaaatgattgaaatgactagagacttggaattataaattaactttataatcattagcgcctaacatgtacaacctttatcttctatataaattgatataaatgaagcggaatagactacttttaaagtctattccgcttctattttgatattttaattttgttggtgtttataagcagcttctacaaaagctttgaaaattggctgtggtctattaggtctagataagaattccggatggaattgacaagcaatgaagaaatcattttctggaatttctaccatttccactaaacgaccatctggactagtaccagaaaagaccattcctttatcttctaattgttctctataagcattattaaattcataacgatgacgatgacgctcttcaatatttgtttcattataaatgtcatgtgccaaagtatgatctttaatagtacatggataaagacctaaacgtaatgtgccacctaaatcttcgatatctttttgttcaggtaacaaatcaataattggatatggtgtatttggatcaagttctgctgaatgagcatctttaagtcctacaacatttcttgcaaattcgacagttgctaattgcattcctaagcaaataccaaaataaggtatattattttcccttgcatatttgatagctgaaattttaccttcacttgctctaaaaccaaagccaccaggaactaaaattccatcaacatcacttaaataactctctacattttcgtctgtcacttcacttgaatcaatccattttactacaacatcttttttcaatggataacctgcatgttttagtgattccaccactgacaagtatgcatcttgtaaacttacatatttaccaactaagccaatagtaatcgtaccatctaatgaattaacggtatctaataaatattgccattcatctaattgtgtatcgtatttagcatctaaatctaagcgtttaattacaatatcgtccatattttgagcacttaattgtaatgggatttcatataatgacgatgcatctctacattcaataacactttctttatctatatcacagaataaagcaattttatcttttaaatcttgagtcatttcatattctgttcgaacaacaattaaatcaggttgaatacctaaaccacgtaattcttttacactatgttgtgttggtttagttttcatttctccagctgctttaatgtatggaagtaatgtacaatgaacatacataacattctcacggccaaggtcacttctaatttggcgaatagcttcaataaatggaagagattcaatatcacctgttgtaccgcctatttcggtaatgaccacatccgcatttgtactttctccagccaataataagcgttctttaatttcatttgtaatgtgtggaatcacttgaactgttccacctaaataatctccacgacgttctttttttagcacatgtgaatatacttttcccgcagtgacattagaatatttatttaaattgatatctataaaacgttcataatgtcctaagtccaagtcagtttcagcgccatcatctgtaacaaatacctctccatgttgataaggactcattgtaccaggatcaacatttaaatatggatcaaatttttgaattgttactttaagtcctctgtcttttaacaatcttcctagagaagcggctgtgatacctttacctaaagatgaaactactccgccggttacaaagataaattttgtcattgtctgacctcctaatttattaagggttgcttccttactctatctctacaaaatttaaacatttcctaaaaataaaaaaatcgctccctctcacatatttgtaaggggagcgtataacatttatacacgtgtcctaattaaaggagcccgaataaaattttaacatttttcattcaaaagtcaattaaaactaatatttagtcattaaaatcttctgcatcttcaaatgcttcttcttcaccttcagcgatgtcgtcatcatcttcttcttcaataacgatatctgaaccgtcaatatcttcttcattatcatcagaatcatctaatgtttcttgatcatccgtttgagctggaatatcatcgtcatcatccatttcatcgtcgccaagtaacttaagattttcatcttcttcatcatcgtcatcaagaatatcaaatttttgaattgttggtgcaattttttcttcaatatcatctactgaataccaatcacgtaatccccattgattttcaccaacatttaagaaacgtccatctgtatttaagtcagtataaaattgtacaatacgattttcaatttcatcatattcataattaccgagacttttaaattcgtcaataatatcatagagattcattgttgaccctttatcgtgtaataaagtataagccatatcgataaatgatttttcatcaaccatttctttagtataatcttgaattttcattataactaaacttcctttcaaaggattttattatctttacattgcttttattaatagtaacaaagataaattataaatgacattttatgatttcgcaattgctattcaattagtaattaatatattttttgaaaataactaagtcatctgattgatctgtctcaacaaagccgctactaatacataatggcttaagttcattattttccccaaataatgtaatacctatacttcttatttctttaaaatgtttacgtacatatgtaggaagttgtcttaaagcactcccagcaatcccctcttttctttgatctttatagacttctattgcagcgatatttagatgagtatttagatgttcgagtgcaataaatccaactttttgatcatcttttaataaatcaataatttgatacattgcaatatttgaatttttattctcaactaatttcaatgacgatacatgtttagaatccaaatctaaatagtataaacgttctttaccgatgggtccttcttctttagtagcagtatgcatgaatccggcacgttcatatacattccatgccccttcattttcagtatcaacaactaaatataaatgattgaaatctggaaataatagttgaacatattgaggtaaatacatcatcatagttgtaccatagccttgtccttgaaatttttcattaatagacaatgatcgaacataaacgacatgctcaggtgtatcatatccttcatgttgataatactgatgaagtacgaagaatcctactacatctccattttcattaatggcaatattagctactcgattttcatcttttaaagcatcttctaatacagatttaggtaatgatgaataaatttgttgtcgttcgcttaattcaaagtttaagacatcatcgcgatattgttcttcaaattcctgaattgtaatattttcaaattgctttactatactcataaaattaacccctatatctcaaagttgttttaataatatcatatataacctttaaatcttataaaataatctatttactctaatatttactatttattttataatattgtaaaataattgcaattcgtcaaaattattatagtattaacatgtcatatattaattttagaggtgaaaaaaatgaaagtaggtatcgatgccggcggtacattaattaaaatagcaatggaagatgatacacaccgtacattgtcaactgaattaacaacagatataaataaagtcattcaatggttaaaccaaaatgaattcgaaaaaatcaatttaacaggtggtaacgcaggcgttattgctgaaaacatcaaacaatcatcccaaatatttgttgaatttgatgctgcttcaaagggattaggtattttacttaaggagcaaggccatcatattaatcaatacatatttgcaaacataggtactggtacatctttacactattataatggtcaccatcaagaacgtgtaggcggaattggtacgggtggcggaatgattcgaggtttaggttatttattgactgaaatatctgattatgaaacacttacaaatctcgctcaatctggaaatagagatattatcgatttaaaagttaaacatatatataaagattctgaaccgcctattcctggtgaactcactgctgcaaactttggcaatgtactaaataatatgaatgaacattttactaactcagataaattagcatctgtcgtgggtgtcgttggagaagtgattacaacgatggcgattacagtagctcgtgaatgtcaaacaaaaaatgttgtttatattgggtcttcttttaataataatcccttactacgaaaagttattgaggattatactgttttacgaggatgtcatcctttttatattgaaaatggtgcattttcaggtgcaatcggtgtccttcatttaagctaattcaaactaaaaacattaacataaaaatcccaatagatttcttaaaaaagaaacctattgggatttgatttaaaatgataattcattagatactttttgtggagaaacaatggtgcctacgactccaggttttaagtctactgcgacagcttgatcattatctcttaatttatcaagccattcactaaatacactaccttcaatttcgattaaatcacattcttcaaaatctttatcacgaacttttcgtgcccgatttttaatactccatacaggcataatattaggtttttgattttctttatcactaataagaataaatcttttttcccctttacgtgttaagccaaaaacatgattttcttttgaaatatcttttgcaaattctttaagacgaattttgtctaattcagacatgagttcattcatcatgtctacaactttgacaatatgtccctcttctttacttgaagtattgattaaaattttatcactttcatcaaacaattcatccatatcatacgtaacgaacgtatcaatatcaatatttaatagtcgatcaaattgaatgtctgagtgatttaaatactcttttgcgatgtcttcattcgtccacattcctgtgtaatcaccatcttcatgatgaatacgaattaattttttatttttactagccaaaataatgacttcattaattaatatctctttgaaatagtcattatgcttatattccattacaaaccctctctcttaatatactaattaaatgttaaattatattaaaattaacgtcaaacatccatattttttttataattaatttaacctatactctaacttaattagtatcatcaagttcactaataaatgcttgttctaattgttcaacttcttctttagaatcagcattccatatacatccaaagcgagaattcacttcatctttaccaaaccaatcaccgtcataatacgaaagaggataaagcacgccttgtttaacatattttaaaataacattgaagaaacgagtattatctcctcttgaaaaataactataaaatttttgatagttaggatttaattcatcttgtaatagtagcatgcttgtcgaaccattttgtctaaaattcaaatctatagcaaatacattatcattttcatctaataataaatcaaatcctgccacaccaataaagcctaagttcactccattttgcataatttcacgaccagcttgaatcactttttctggaacatcatgtacattttcatttcctgcgtatagaccatatttatcagtaatttgatgggcagtacctagataggtgatacctatttttttagaatatgcaaattggacacaataatttttaactgcttctattttttgttcaatgattaaattatcggtagcatgggccgcttcaaatattcgttgagttgctttttctaagtcttcgtcgttatagcaaatcattacgccataaccacctgcagttggtaattcatctcctggcttaattacaaaaggataatcccaatctttgatacgacctttgaaatctctaattgacacaatttcacggtctggtaaatatttatgatttgtccattcaggaatacgtgatttattatttaaagctacaaaaacgtctttatcaatggcatacgcttcgtcatctactatgtcattgttttcgatatattgaaaatatatttttttcccttctttattgataatctcttgtaacaagcgttcatacgtttcacgatctctaaatgtataaagatgctttggtatttttttaccaataagatcaaatagttgttgtaatttatctgtaatactcgcttcgtgtacaacaatcggcatatccttagcgataatcatttcacgaccagtcaaaaaattagactgatgctcttctgttgtgagccaaggattcaatgcataagaaggtcttgaattatatacaatattttcatcatacaaatcacttaacgttaactttggaacattatattcatttttcatttttttacccctttatttgagaatgttgctccacaacctcatcaaatagttttttattttcaattaattctagtcccataagagcaataatttttgcgccacgaatcaaagcttgatcaccatgaacacttgcagctgcttctctaaaacggtgtgtatgacctactaaatttcttgagccaattttaacatgtggatgaatcgtaggaactatatgactaacatttcctgtatctgtcgaaccaaaaccaaaatcatcataacttacttcttcgccaacttctatggcgtatttttcaaataattcgtctagtttaggtgtttttataaattcatttacaccattttgaataggaccaaattcatagtcacaacccgtttggatggctgcacctcttgcaatttgattaacacgttctgttaaaatatcaagttcttttctagtagtggcacgtgtataaaatctcgcatgtgtataatcaggtataatattagcagctttacctccatctaaaattacaccgtgtacacgatgacttttcttaatatgttgacgtaattgagctacaccattgaaataagaaatcatcgcatctaatgcatttaaggcctcatccgcattttctgaagcgtgggcgcttttaccataaaatttaatatcaagcacatcaacggctaatgtatttatcgttggatatgtttcatttccaggatgaatcataagtgcaatgtcaatatcatcaatcacaccggcttttacatatgaagcttttgcacttccattttctccaccttcttcggcaggacatcctaatacaactacttttccaccaacatgatcgatgacttgtttaagtgctattcctgctaatacacttgctgtcccaatgatattgtggccacatgcatgacctaaaccaggtaaagcatcatattcagctaaatatcctatagttggtccttctttttcagactggtaagttgcaatgaacccagtagcatgtccggcaatatctgtttctatctcaaactcatttgctcttaattgatcaatcaatgttcttgatgcaaatatctcttcattgcctaactcaggacgctcgtgtatacgatggcttatttcgacataatcgtactttttattctctatatagtctaatatctcttgtttactactcatcaatctatactccttttatacacgaatattaatatctatatttatttagacatcaagtcaatcaaattcttaatgtatctttaaatttaattattacttattttatcggatttactatagattgtcatcatattcatttgaatttacaaaattttcttacaataatcatttgaattacttaattaagaaaattgtaaatgattagcactcttgttacaatcatattattcaagcaatgtatttataggaggaaataaatatgactaaaatgaacgttgaaagttttaatcttgaccatacaaaagtagttgcaccatatattcgcttagcaggcacaatggaagggattaatggagacgttatcaaaaaatatgatttacgttttaaacaaccaaacaaagcgcatatggatatgccagcgctacattcattagaacatttaatggctgaacatatcagaaatcattctgataaagttgtagatttaagtcctatgggttgtcaaactggtttttatgtttcatttattgatcacgatgactacgaagatgtattaaatattattgaaaaaactttaaatgatgtgttagaagctacagaagttcctgcttgcaatgaagttcaatgcggttgggctgctagtcattctcttgaaggtgctaaagcactcgcaaaagaattcttagataaacgtaatcaatgggacgacgtttttggtgaaggcaaataattaataattaaataaataatgagtccgggacataaagtatctagataagtgaaaaaagacaatttctattgaaataatatagaaattgtcttttttataatttttttgattattttcagctcgttgagctgttacttttcttataacgtcaaaggagcaagctcctcgtctgttcgctcgacttgcatgtattaggcacgccgccagcgttcatcctgagccaggatcaaactctccataaaaatttatgatgtttgattagctcataatactaaatagtgtttgtaacatttaagttactttattggaattaacgttgacatattgtcattcagttttcaatgttcatttaaaatttataatggagcgggtgatgggaatcgaacccacaacatcagcttggaaggctgaggttttgccattaaactacacccgcaatatataatgattggaattgatttggtgcggccgagaggacttgaacctccacgggatttctcccactaggccctcaacctagcgcgtctgccattccgccacgaccgctggcaaaacgcaataatctattgattatcgagaacagtatttattgtaaatgatttgtaataaaaagtcaataactttttaatattattttaaacaaatttactattttttaatgtttacgtcattcattattacaacgataactataatacatactttttaaacataagtcaatagtttttattaaaaagtttaaaaacctacaacattgtaggtttttaaaggacattgttatattagtaaagtcttattgttcatatttaaatttatttataaatacatctttaatttcaatttacttccacatttaccacatctcattttatcagtattaacttttctaattcttagatatgtagttttacatttacaacattgatatatataatttgctctttcttcatagctttgaatcggctgacaaaatcttggtgcttgaactttattgcttagcattttaaagtcatgatccttatgttgataaccttttccggataaatgtaaatgataatgacatagttcatgctttatgatatttattaaagcctcttttccaaaacgagaaaattgcttcggattaatctcaatatggtgtgtagataatacatatcgtccgcctgttgttcgtaatcgagaattaaaatacgctttatgtttaaaaggttgtttaaaatactcaagtgaagttgtttctactaacttttgaagcattttattattcattaggattaatcatagtcaatgatactttttctttatttttatcaatatttaaaatccaaacatcaactatatctcctacactaataacatccataggatttttaacatatttctttgataattttgaaatgtgaactaaaccatcttgtttaacacctatatctacaaatgctccaaaatctactacatttctaaccgttccacttaacttcatacctttagacaagtcttcgattgataatatgtcagattttaactgtggtgtttcatagctatcacgaggatcacgatttggcgctttaagagattttataatatcttctagtgttggtttgcctattccaatttcgtttgatttttcttcaatattaatatcgctaagtgtttgtttaagtttatctgaacctaaatcatcaattgatagttgtaaactttctaaaaactgatatgtcgcttgataactttctggatgaatagatgtattatctaatggttctttaccattaactattcttaaaaatccgatactttgttcaaacgttttactacccaaacgttttactttgcttatttcggaatgatgctttatagatccattttcttcacgataatcaattatattttgagcaatggtacttgataatcccgaaacatattgaagtaaagattttgaagcggtatttacatctacacctacttggttaactgcagtttctacgacaaatgtgagagcttgttcaagttctttttggtttacatcatgttgatactgtcctactccaatagatttaggatcaattttcactaattcactaagcggatcttgcacacgtctaccaatagacactgcacttcgttcttcaacttgaaactctggaaattcatttcttgctatttcagaagcagaatatacagaagctcctgcttcatttacgataataaattgagcatttagttgatatttttttattacatttgctacaaattgttccgtttcacgacttgctgtaccattaccaattgcaattaattcaacattattttcagttatcattctaactaattctttttctgccaattctattttagattttggaggatgaggatatataacacttttagcaataaatgttccaaaaggattaataacagctaatttacatccagttctaaatgctggatcgacacctaaaatttgtttacctttcataggaggctgtaataataaatgttttaaattttcactaaacacttctatagcgtgatgctctgctttttcagttaaatcatttcgaatttctctttcaattgaaggcaagattaaacgttttaaactgtctttaattgcagactcaatatattcaactagttgatgagctttttttacttcttgcgattgtataaatgtttctattgaagtagtatcaaattcaattttaattgacaatactttttctttttctccacgattcattgctaaaattcgatgattaactattctttttataggctcagaataatcatagtacatactaaatatctctttttcatcatttgcttgttttttctttgttgtcacaatctttccttgataataaacgtctttaagtaaacgttgtcgatacttaggattatccgaaatacgttcagcaataatatcttgagcaccttgaattgcctcatcaactgttttaacttcttcacttaaatattttctagcttcttcatttacattcatactttgtccttctattaaaaagtgagctaatggtgctaatccttttcgttttgcttcagttgctctagttttctttttttgtttaaaaggacgatataaatcttctacacgttgtaattttgtttgttgaagaatgtcttgctttaattcatcagtaagtaaaccttgttgttcaatattatgtataacttcttctttacgtttttgaagatgcgctacatattgatattcatcagatatttgtttaatttgaacctcatctaaaccaccagttgcttcttttcgatatctggcaataaaaggtactgtgttattttcctctaatagatttaatacagctatgacttgtttttctaaaaattgatatttttttacaatatcattaattaatgtcttttccatgttataaccactctttgtatataaattctctttaattttaacatatctttatttttacattacatttttaacaataaaaggagcgccatagaattcaatatgaactcattggtcgctcctcaatttcattgcttagcagcttgttgtaattttcgtattgcagttcgttgtaatctagatacatgcatttgactaagtccaatacgttcaccagtttccttttgacttaatccttcaatgaaagtacattgaataatttctctttctctatcagataagattggtaaaatacgttcaagaatcattcgtttttcagtaaggtcgtaattatcatcttgttgacccataatatctaacaatgtaactgtagatccatccttatctgcttcaattgaatgatctacgctaagtgcgttatagctttgacccatttccatggcttctaatacttcttcttcatttacttctaaacggttcgcaatttctaaaattgaaggagaacgtccgagttcattcgtaagttcatcgcccactttttttattcttggaccaatttctttaattcttctaggaacatgaacgctccatgtcttatctcgtaaatatcttttaatctcaccaataacagttggcactaagaatgcttcaaatttgcgatcgaaagatatatcaaatctgttaatagcacctattaaaccaaccatacccacttgaactaaatcttcatgatgtgattgtccttttgaatacttatatgctaatgattcaattagtttgcgataatgtttaactaatttatcttgcgcatgaggatttatattgtcttggtgttctttaatccattggttaatttgttcaggtgatatctcattaactgatttcgactctttcgtcattatttggcacctgctctttttttatatacttaatcatactaattgttacaccagactcttttgaaacttttacttcatccattaatgattcaatcaaaaatagccctagcccaccttcacgtaagaaatcgatattttcgttttcttggtaaggccctaattttgattttgtagattcgtagtcaaaactttcaccttgatctgaaataataatcttaattttgtcatcaaataattcaaaacaaatattaatcataccattttgttcactatgtttatacgcatgtttgacagcattagtaaccgcttcacttactgcaatttttgaatcttcaatatcatcgtatgaagcacctgctcttgtaaatactcctgataaggtaaggcgaattaaacttacatattctgctgaggcaggtaacttcatttcaatataatcatttttgagtgacaaattactctacctccgttccttcattaacgtgcattaaatcttttaaaccagtaatatcaaataatctactaattctatctgtgacacctaaaatatataattctttatcattttgatttagagcctttaatgttcctacaaataagcctaaacccgttgaatccatataacttacatttgctaagttcacgtgaatatcatgatttccttcttggcgcataggcacaagtacttcttctaactcgggtactgtatatacgtctaactctccaccaacaataacttcataataatcatcatgggttatcgtttctatattaagattcatttacttacactcctaatctttttcgatatgtatactatagcaactatacccattattattataatataatcaaaaaattaaataattaattcactctttttattactaaaattgtcatgtcatctcttttttgcgtattttgtatttttaaaatggcttcatataagatttgaacaatatcttggggatgcatatgcttatattttctaattaaattaagaacagtatcttttgcaataaactccccctttttatttctagcttctgttacaccatcagtaaaaataataattaaatcatctaaatatattggaatttcttgttgactatatcgcgtatgttgacttacaccaagtactcttcctcgaacttcaatttcttcaaatgtttcagtttcagctctataaatgtatcctggttcatgacctgctgaactacaatataataagtgattcatttcttcatatagtccataaaacatcgtgacgaacatattttgattaacatttttttctaccacacgattgagtcgttttaaaccatcacttggtaattgtgaatgaccataggaatccattccaaatttaatcatactcattgctaatgctgctggaatccctttccctataacatctgctacagcaaaactcatcgtaccatctctatgatcaattaaattaaaatagtctccacttactttttgagcagctactgaaataacacctatttgtatactatcaaactgtggaatgtctgtttttaacatcgtttgttgaagtctagaggctaagtcaatttctttatcgtggaattgcattttatcaactaaattttgataatctctatagctatatccaaagccttttactacttcttctaatacatctaatgtatctaagatttgagatgtttttaaatttaaagaagcaatatacgttttatgtaaatcaacaacatcttctggtagaatatcctttttgattacttcttcagtgaattcatcgcacttctttaaaaattgttctttatttttagtaaccaagctctcatctataagttgcttatagttttttttaaattcttccacgaattttgcctccttacttcatagctgattaaaatatgtttaaatattgtctgacacaatacaacattttaaatttattcattaatatcaaatgtatattattctaaaataactcttctacttaaaaagggagcaagacagtattcattttgtgaatatgctgtcttacccccgcaaggttaattgaaattgaaaacttaagttaaatattttcaattcagttaactactgcgatatctctaaatagtcataaacttactcaatactatcattgaattcaactgaatttagtctaattaaaacttttcaaaagtacaattgatttatttcaaaagtttatttcatattttttggattatacatataaaatactaatttttttgaggacgaacatcgtgtaaacctaaactgatatccaatgcatcgtcaacttctttcattttatcttctgataaatatgtaagtttctctttcaatctttttttatctaatgttcgtatttgttctaaaagaatgactgaatctttatctaaacgatattttttcttttctatttctacatgtgttggtattttcgctttattaatcctaccagtaatcgcagcaacgattactgtaggactatatttattaccagtatcattttgaatgataactacaggtcttactcccccttgttcagacccttgaactggtgataaatcagctaaatatacatcgcctcttctaatcattcacttttataattagatgtaagatatgattcgttacaatcacaagcttcacattctaatggaaatgcttctgttgctagggagaggtttaaatcggccatttggacatagccctcttttaatgattgttcaagactatggcttctattctgattaaaagttaacatactatgaacctccaattgatacaaacaagacattataaactttaatttagttttataataacaaattttgtaacaagtgactatactaatttaataattcatttgtaacttcaaattttttatttaaataatatattcttggaagtctgcgtcctaaattacataaaacttcataattaattgtattttgttttacagctaatgcctctactgcttgtgaagaatttaaattgttatctattaaaataacctcatctccttctttcacatcatctggtacactaataatcatttgatccatgcatactcttccaatgatttcacattgctgttgattgacatttacggcaaatccttgcatagatcttaagaaaccatctgcatatccaattggtaaaaccgctattttcattttttcagttgcagtgaatgtacttccataacttacagagtctccaggatttaaatatttagtttgaacaacttgagttattaatttagcacttggttttaattgaacatcaacttcatttctaacatattcagaaggataataaccatatagtgaaattccaagtcttaacgcattgcataatttacaatttgctaataaagcgcccgctgagttttgagcatgtatatattttggtcgctctgcttttgttaccaactcttcaaaaaatgcatattgctgtttcattgaatcaccaggttcatctgcattggcaaagtgagtaaaaacgccgtcaaaaataagatttggatgttctttaataagattaatgactaactgatactcttcaagcgttttaatccctagtcttcccattcctgtatctaatttcacgtgaagatatacatgatctgagttatcttctatataatgaatcgctcgttctaaccaaaactgtgaaggcacagttaaggtaatgtcatattgaatcgctttatttatatctttcggtgatatcgcacctaaaactaatagtttagcatttatattatgtaagcgtaattcaatggcttcatctaaagtagcaactgcaaaaaattgagccccattattttctaaaatttctgctatttttacacttcctaatccatatccattcgctttaattacaggaatcaccaacttatcactttgaagtgttttaaaaatattataattgtatagaatggcatcaagatctacatttaaatatgtcggtctataagcaacatctgacatatgaagtcctccttatttaaacttataaaaaattgatatgatttacttttctaatattacttcactcattgcgtaatgttgtgtatgcgtaatcgagacatgaacaataaaaccaggatattcgatgcaaggtttccccttttcatcgttataacaatcaatatcattaaatgctaccgtttttcctaaccctgttcctaatgctttactaaatgcttctttagttgcaaatcgtcctgctaaaaattctaattttcttttatcatttttaaaagagttaaatttttgctgttcttgctctgttagtattctatgtattaatttatcactttgtttaatatacacgtcttttattcggtcaatttcaattaaatcaataccaataccatgtatcatatccacacctcacttaattatcctttatcattcatatagttctagttcgtgttttctattttgaatcatttgttttaaataaatcgcttctttttttgcaattagttctatattgcattctccacctgcagtagataaatgaagatgtgctaatttatattttctcattatgaatccttctatgacttctatattttgtattctataaaacggtatcatatctgtttcaacagttatgataccttttctaatatgaatctcgttttcatcatagtaataactgaaataatgatatctcagaagcggaataacaataataaatagtatgatataaagcaatataatgactatagaaataatgatattaattgaaagttttgatatatgagtaaaataaacatctatcatattgagtagaaataaaaaaacagtaataattataagccctatcaatgatgtgattctcatcacctttagaccactcgtgttcataaaactatgttcactcaatcttagaccctcctaaataggtctcaatatttaattgaacctgtttttcagaagcatatttaagcttaatatcttcatttaccgcacccttagctataataaaatgtaaatgtgctaaacgactcttttctaacaatggattttgattaacattcataccaataattttatcctttttaaaataataagaattaatatgcatgatacttacttgacgaagtgcaatttcattttttctattgcataatccagaaacagatatatacacatacgcatgaattgccataaagataatcataattatcgctatcatataactccatatactccaatagtaagcacctatagttgcgccaagaattaatatgatactaggtataaaaaaatgtcgatgatatcctcgttttggtacattttcagtaatagagttaaattgcatttcaggaattaattttctaataatagaatatgcctcttttttattaataaatggaagaatcataatttttccattttcacttacatcttcattagatttaacttctaaatcacttgtaataataaagtatatagaggtatatccaaataactttctaataaatgactgtttttctacaactgcttgtaatcgttcagtaggcactgtgacattttttacatttagtaatccataagtaattttcaactcattatcacgttgtgtgattgtatagttataataacggagaaaaacaattagagtacctataacataacaaaatataagtacagtcaatataataatagtcactaaaaacgtcactgactgtatccattgaaaaagacgagacgtccatttttcccatgggataacatcttcaaatgcacctataataggggaaatagtggcgaatgctacacctatcacgccactggtcaatgacataaaaatcaacagtttattagacattttaaaaattactttattattactattatcttcagatattaattcttgttcgctattattgggcttatgattagtctctatttcttgactatctaactgaagttgtctttttttaattgtacgttcaatcaattcactttgttgtttcgaaatcgtttcaagttcaataccatcactcggcgttttaatttgtagtcgtactccacctactaattgattaatcagtccttgtgtggtatctaaggattgaattcgattcaaatttaattctttgcgttttttatttaaccatccagatgtgactataaattgatcattttctatccaataacgcgttagacgtactttttgaaattgattaatcatagaaaaaagaataatcaataaaaagatacctggtccaatataatgtctaatatttgtaaaatcaaaattccatatattaaatccaataaacacgataatgacaaaaatgttttgctttataacatttattagacccgtgaaataagaaatcggatgtagtttttgaggtttaaatatcatcattactacctcgcatttgtgataagatatgtaatattaatcgttctgcttctttattagaaacaacaggtgttgtgagttcatgacctgcagttacaacaatgattctcttaagattaaactgttttaataacggatttgttttaacctttaaaagttgtaacctttcaatttttgttgttttgtaccttttaaaaataaaagtatttaaaatttctatgttcttattttctatattataaaatctataagagtatctattgataggttggagaataaaacgaataagagaacaaatagttaacacaagtagaatataaaaaataaaatgtggccagtgaaatgctttccaacaacacaacccaccacccaaaataatgagctctattagtaacgtgactccacttactaaccaatgatataaaaatgcggatttaggacttttatgaaaagagtgatgtaattgcacaataaactccttaacaatttttttatattatatcatactattttttaaaaataatatgatagatattaatgtaaaaaccaaaactgaatactatctatttaaatacgatcaattatcctctttttctttaaaataatattagtataagcatttataaatttaataggtaacttataatcaaaaagagcttgagacatatgtttatatctcaagctcaatcaagcaaatttattcttatctataacaactatttttgtaaatcagcaaacgtacgacctttgatagatgtttttcttttatcttgtctatctcgacgatcttgttttttaccttttttcttgttgaaattaccttttgatcgtttatttttgttatcaaatttattatttcgtttaccaccacgtcttgattgattacctttattattacgactctttcttgcaagtggcttttcgaaagttaattgaacttcaacttcatcgtttgcttcgacaagttcttgtaataatgaagctactaattcagtactatcatattcttctaataattcactagaaatacgttttaaacgatcttcactctcacgtgacatccagtttttaactttgtctttaatatcttcttcacgtgctttaagcacttctttacgatgaggtggtcttaaagctttcattcttctgtcatttacttcttcaatttgacgaatgtaatccatttcaattgggttaacaaacgtaacagcaataccttctttacctgcacgacctgtacgtccaattctatgtgtataactttcagtatcttgaggtatatcaaaattatatacgtgacttacacctgaaatatcaagaccacgtgctgcaacgtctgtggcaactaatatatcaatttgatcgtttttgaattttttaagtacttctaaacgtttggcttgtgtaatgtctccatgtaatccttctgctttgtaacccttagtaagcaatgcacttgttaactcatccacacgacgtttagttctaccaaatacaatagctaactcaggttgatgtacatctaagaaattagtaaatgtatcaaatttttctaactctttaacaattgtatagtattcgtcgatttgaggatcagacatttcattgttcattgttttaacaatttgtggtgacttcataaattgttgtactaatgtctgaatagctttaggcattgtcgctgaaaataacattgtttgtcgttgttcagcagggattttatccataataaatctcatatcatcaatgaagcccatgttcatcatttcgtccgcttcatctaaaattaaagtatgaatatcattcgtttttaatgtacgacgatttaaatgatcgataacacgtcctggtgttcctactacaatttgaggcccacgttttaacgctttaatttgtctatcaattggcataccaccaaagacagtaacaacttgaatattttgtccacgactgaattcgcgtaattgttcagcaacttgcattgctaattctcttgtaggtgctaaaattaaagcttgaacgcctgattttccaacaactttttctattaaagggataccaaaagctcctgttttacccgtacctgtctgagcttgaccaaggatatcttttccttctaatgtataagggatactttctttttggatcggtgttggttctttaaaacccatttcttctagggtttttaccgttttatccgaaatccctaattctttaaaattttgcaatataattctccttttaattcttttatttatcaatatacgtttttgtatataaggtcttcttattacgtcaacttctatatagtaccacctaaaaatagttatagcaataaagcaattttcatatctacagcaaataacatttttaagtagagtattggttctattaaaataataaaaagaagttgctttgaaacctttcatttctaagcaactcttaattattattaataattaaattaaagcatttactacttcttcaagtttattaccacgtgaccctttaattaacactttgtcatcaggttgtaaaatagactttaaataatgagtcagttcatttttatctgaaaaataagctacatcttccacaaactggccacctgtacgacttataaacttagcatcattaccgtaagtaagtaacgtatgaatacctttattgtccaaataagcacctacatcttcatgcatacgttgactattttcacctaattctaaagaatcagcgagtacaatgattttacgtccattcatattacttaatgtatcaatagcagctttcatacttgttggacttgcattgtaagcatcattaataaccgtaatttgattattagtaacatgtcgttccatacgcatacctgtgagttgtacattacttatattcttttgaattgtgtcgtaatctaaaccaagttcatgtccaattgcaatagcgatagtagcatttttcatgttgtgaatacctaaaattggtaattcataatgttccttgttatttatcgtaaatgctataccatcatttttactattttccactttacatactaatgtattgtcatgatttaaaccaacactaacaagtttagcatctttcacattttcaacatgcggttttagaagtggttcatctccatcatatataaatgtgccatcagatttaagaccaatagtaatttcagatttggctttagcaataccttctctagaacctaaatcttgcatgtgagattcaccaatatttgtgataaccgcaatatcaggttccgcaattttagataacaattcaatttcatggaatcctgacatacccatttccaaaatagaaatttctgtgtctttgtctaattgaagaatggttaaaggtaaaccaatttcattgttatagttaccttgtgtttttttgactctaaattcggtatgtaacacactttcaatcatatcttttgttgtggttttaccattagagccggtcactccaattacttttggattaacatgctttaagtacgctttagctaattgttgtaaagcagttaatgtatcatctacccatataataggtccttgaattgaatcgctaatatcctgtcctttttcataaaatgaagcaccagcaccatcttttagtgcttgttctacaaaacgatgaccgtctacattttcacctttaaatggaacaaataacatctctttttctacatgacgagaatcgatagtgactcctttaatttgatgttctaaatatgcttcatcaatatcgcaagatatccatttttgaatttgttttaaagaaacttcaatcatacttaggctcctcgcttaatcgatagtatatttatttttctttttatcttcgtaacgttctttagctaaatcaattagtttagtgattaaatcagagtatgataatcccatattttcccataaacttggatacatgctaaatgctgtaaaaccaggcatcgcatttgtttcattaatgtagatttgattatcttccgtcacaaagaaatcggcacgtactaatccagaacaatctgtagctttaaatgcttctaatgccatattacgtaacgtcatttgaacctcttcatctaaatctgctggaatttgtaaactgattttaccgtctttatattttgacttatagtcataaaattgaacatctttaattacttctccaggccatgttgtttcaggataatcattacctaaaactgcgacttccacttcacgtgcaataataccttgttcaatcactaacttacgatcaaattgaaatgcttcttcaatcccttttttaagttcatcttcattattacatttactaatacccacactagatccaaggttagcaggttttacaaatactgggtatgttaatttatcattaacgagtttaataatattaccttcatatttttcatattcacttcttaaaaaactaatataaggtagttgtggtaaaccgcgatgttcaaacaattgtttcattactaatttatccatcgaacttgatgcagctaatacaccatttcctacatatggtaaatctagcacttcaaataaaccttgaatggtaccatcttcaccatttggtccatgtaataatgggaaaatagcatcatatttacttccttccccattttcttttaaaagtaatgtaatttctccaggacttatgtcttctaaatgtaattcttcaacagttttaatattttttgtaatattttcttttttcttccattgaccatcatttgtaatatatataatatctacaagatacttgtctttattaatcgcatttaatacattttgtgctgttaaaattgatacatcatgctcagcacttttaccaccatatacgatacaaatattttcttttaccatgttttatatcctccatcgagaaaaataatgacaaaagccatttataaattgaagtttaattacgcttttgtttctctcatcataattataatactataatgtattaagtttaaattgttaattatacttttcattaacgatatgtaatttaaattattctttctaaatgtccatattatcacagtatcagtgtattttgcatttaccaataaataaaaatatgtatatttcttaaagaatagtccattcatgttaattgttattttttagattaaactgcttcgactttatatcatcttctatattttgtagcataatcatataaagtcatgtaaaatctatatatactattccatagaatttaaggagttttttatgaaatattcatcccgtcaacagcctacaacacattggcttcgaaaaattgactggatacttatagcattaataatgattttagccatcattagtgtgactacaatcagttctgctatgggtggcggccaatatagtgccaattttggtattcgtcaaattatctattatattttaggagcaatactagcacttattgtgatgattttttctcccaaaaaaataaaaaataatacatatatatggtatatcttcttttgtatcttactactaggtttattaatcattcctgaaacacctattacgcctattattaatggcgctaaaagttggtatgcttttggtccaattagtattcaaccttcagaatttatgaagattattttgatacttgcattggctaaaatcgtttctaatcataatcgatttacatttaataaatcttttcgtactgatttaatcttattttttaaaatcattggcatatccctggtacctatgatattaattttacttcagaatgatttaggaactacattggttctgtgtgccattattgttggaatcatgctagtgagtagtattacatggcgcattcttgctcctatctttattactgtagccgtattaggaagtagcattattttagccattatatataaaccctctctgattgagaaaacgttacatatcaaaatgtaccaaatgggtcgaatcaattcatggttaaatccttatgcttatagtaatggagatggctaccatttaacggaatcgttaaaagctataggatccggtcaattatttggtaaaggttataatcacggagaagtatacattccagaaaaccataccgattttattttttctgtcattggagaagaaattggatttattggagcagtgatattacttcttatattcctagctttaattttccatcttatccgtttagccataaaaacaacttcatcatttaataaggtatttttaattggttatatttctttactcgtcttccatattttgcaaaatattggtatgacaatccaacttttacctattacaggtataccactaccatttattagttatggtggtagcgcattatggagtttaatgctaggtattggtgttatactttctatttattaccatcaaaagccagcgtccaaagatgcttagtaataaatatattttaattcagttaataacatgaaaatagtataaaagagaatgagacaaaactcattttgacattatcgttccacttcgataatgtatctccaacatataaaaaagtctgagacaactaataatgtctcagacttttttcaatcacatattatttaagttcttgagtaacggtttttgtggtaggcaaagtattaataatgtcgaaacgagattttgtttttttgatattgacgcctaaagatgataataatttgactacattttgtaacttatctgatttgttcatggtatctcacctcgttttttgaccttcactgatatactaccctaattagtcatgctttactaccatatttgaaaattattttaaattatttaagttacactaaagcttcttattatgaaagtactttaaatccagcgtcataaatttctttttcaatactatttaaattagtaggtgtttcatattcaacattaaccatatttctttctatatcgattgataccgtatgtactccaatcatatttaacaaacgttcatttaacatttgtgcttgttcctttgtttcaatgttatctataaatacaatattacggtttaacatattacaatctcctaactaatctttcactagtttttgaaatgtcactagtagttcttccattgcttcttcttcagtaccttgatttattttttccataatacaacttttcatgtgatgttctagtaacttagtagcaacactattaagtgctgaacgtgttgctcttatctgagttaatacatcatcacagtagacgtcttcatcaatcattcgattaattgctttaacttgtccttctattcgatttaatcgagattttaaatttaatttaacttgctcagaatgatgggcatgattttgattttccaactaattcaccctttcaatagcttctatatcatcgtataatctcctctttattacgtcaattatacatttttattttaaaaattaatcataccatttattatagtgcatggtacaatatttgttagtacattaattttaaatgatttaggaggttcaattaatatggtagagatcgtgcaattatctttctcatattcttctttaattattaacatcatattaatcactgcctttatattaaacttgattttcgcatttatcattatcttcatggaacgtcgtagtgcaggttcaatttgggcgtggcttttagttcttgtatttctaccgatagtaggatttattttatatctattattagggcgtcaaatacaacgcaaacatatttttaaattaaaaaaagaagatcgtaaaggtttagctatgatcgttgatgagcaattaaatgcgcttgaaaaagatgatttttctaaaggtaatcatcaaattgttaagtttaaagaaatggtgcacatgttactctataataatgctgcattcttaactactgataacagtataaaaatctttacagatggtcatgctaaatttgacgcattaattgaagatattcagaatgctaaagattatatacatattcaatactatattttcaaaagtgatggtcttggacgtcgtattttaaaggcactcgaagacagacttgaagatggtatagaagttaaaatgttatatgatgatatgggttcaagaacattacgcaagaaagatttgaaacagtttaaagacaaaggtggacacgcagaagccttcttcccttccaaattgcccttaatcaatttaagaatgaataaccgtaatcatagaaaaattgtaattatagatggcaagattggctatgttgggggttttaatgttggtgatgaataccttggtaaagataaaaaatttggttattggagagatactcatttaagacttgaaggtgattctgtcaatgcattagaattaagattcatcttagattggaattcacaatcaacacgtgacaatatcagatatgaagatagatattttcctgatgtagattcaggcggcgagattggtgttcaaatcgcttcaagtggtcctgatgaagactgggaacaaattaaatatggctatttaaaaatgattatgtcagcaaaacattctatttatattcaatcaccttattttattcctgatcaagcttttattgatgccataaaaattgccgctttaggtggagttgaagttaatttaatgattccttgtaaacccgatcatccttttgtttattgggctacattaaaaaatgccgcttctttattagacgcaggtgttaaaatttatcaatataataatggatttctacattcaaaaacactcattgtcgatgatgaaatcgctactgtaggtacagcaaatatggataatcgtagttttacattaaatttcgaagtgaatgcgttcatttatgacgaagatatttctcttcaacttaaaaaagcatttattaaagatatgaaggtctcatatgagttgactaaagaattatataatcaacgtagtacttggattaagtttaaagaaggcatatctcaattattatcaccaattctttaaactcattcaatacatgtttttaaaggagtagtttatgaatcaagcagaacaaatattattagctaaagaatatatgtaccaatttcataaaaatgattactctggacatgatattgcacatattgaacgtgtcacattattagctaaatatattgccaaacaagaacatcaaggcgattttcttacaatagtattgtcagctctattgcatgacgtcatagatgataaattgactgataaacaccatgctttaagcgaattacatcaattttttaaaaaaatagaattggatgatactgttcaaaagaatattatttttattatcaaacatttgagttatcgaaatggtagaaataacgatgttacacttccaatcgaaggacaaatcgttagagatgctgatcgcttagatgcaattggtgctataggtatcgcaagaacgtttcaattttctggacatttcaatgagccaatgtggacagaatctccctatcactcaattccttcagaaaaagatatggttgatttacctccttctgctattagacacttctatgataagttattaaaattaaaaaaattaatgcacacacaaacaggatctcaactagctgaagaacgtcatcaatttatgaaactatttttatctcaattttatagcgagtggcacttagaagaataaaaaaagtaggaaaagatagatgatcttttcctacttttttatcgtattatacttatattattttttcttcttattatttttagaaacgacttgcgtatttttaccttttttatttgaattattttctttatgtgcctcaaccataggtccaatttcttgttttgcaactttttcataatgtttatttgcaaagaatgtttgaataattaagaatgccgcactgacagaccaatataaacctagtgccgaagctgaacttaatgaaatccaaataatcataataggtgaaacgatcatcatcatataagtcatttgacgttgttcttcaggcatttgtttacttgacacccatgcttggataaagtataacacaccggcaataatagtaatccaaatatcaggatgtactaaattaaaccataagaaatgtggatgttctgtaataccgccaccaatacgataacgcaatacgaaatataatcccataacgataggcatttgaattaaaacaggtaaacaacctaaagcactcttcataggattgatgtcatattttttataaacttccatcatttcctgattagctgccattttttcttcttgagtacgtgcacgtttcactttttcttgtacaccttctacttcaggtttagcaattttcattttttcacgcatcatatggctatttttatagtttgatagcatgaaaggcaataagataatacgaataactaatactaaaacgatgattgcaataccataatcatcatgaaaaacagaatggcctaaccaatgtaaaattttagccattggttcaacgaatgtattgtagaaaaatccatttctattactagatttggaatagtcacatccagctaaaaagaccattacccctaataacaaaggtagtagcgctttcttcttcatttttacacctctattgatatattcacatagaaataattttatcatagatagggtgtactagaaaacaaaaactgaaaaaaaagagatatttatttgaaatagtgctttaatttattaacagtcttgtcaatattttgactatgtgtaatgaccgaaataactgacacaccatcagcgccttctttagctataggctcacaattatcttcagtaataccacctatagcaaccataggtaagcttggattaatattttttaatgttgcaatcatttcagggcctacaggggcacttgcatcagattttgaagatgtctcatacattggacctacacctatataatctacgtgttctaaatctgattgttgatattcctttacgtttcctacacttaatcctataattttatttttaaaacgattagcaaaagaagcaattatttcgtcatcttgacctacatgtataccatctgcatcaatcttttcagctaaatccacatcatcattaatgagaaaaggtactttatactcatggcaaagtgttttcaattccttagctaaggcttctttttcatcccctactaaagcatttggtcctttttcacgaaattgaaataaagtaattcctgattctaatgctgcttttaaaacatctttaatgttttgatcaccgatgatgtcttgtgttccacatataaaataaacttgtaaactttttgaatcaaacatatttaaacctcttcacgttttacaaattgtttataagtatcatagttaagttgatacatttcatcaagtaattgagataagaatgttccaggtccattaaccttttcacttttttcagcaatctctgcggcgatattataataacttactgattcttctaatacttgtaatgatggatgtgtatttctaaataaaaatccagcaactaaaccgcctaataaacaaccagcgcctgtgatttttgccagtaatggagaaccatttgatagtttgacaatttgattatcttgaataataacatcttctctacctgtaataacaattgctgtttgatatttttcataagcttttttagcaattgtcactacatctaagtctgtttccccatcagtgcctttcattgtagtatttgaatctactaaagtaagaatttcagatgcatttcctttaatcacagaaacatttatttcagaaagaaaagtttcacagaattgtttacgatatgttgatgcgcctacagcaactggatcaaatacaatgggtgtaccttgttgattagcaatttttccaatttctaaaatatctttttcatttgctttagttaatgttccaatatttataagcagtgcccctgctactttatagaactcttctgcttcttctggagcttcactcattgctggacttgcaccaatactcaagagtccattcgcagtgaagtttttaaccacatcattggtataacagactactagtggattctcttgtcttatcttttctaaactattcatcgtctaaacctactttcttcatataagcaaaatggtttaccgggccgcgtccttgaccgatttcaggtgtatgttcaatacttaatgaaataaattttttagctttttttacagcttcataaattgttttacctttagctagttcggctgtgataacagctgaaaatgtgcaacctgtaccatgagtatgtggcgtattaaatcgcttctcttcaaaagtatagacatcatctttagtaaataaaaagtctttagcattatttaaatcagcagaatgaccgcctttaattactacacctttacttcctatttcatttataaatatatgacctgctttacgaatattatcttcagtatcaattttcaagccagtaatttcttcagcttctggaatgttaggagtaacgacatccgctaatggtaagagcgttttctgaagatgtttttttgtttcatcatccattaaggaatcaccactttttgctagcataactggatcgataacatagggaatattgctatgattttttaaatacgtttgaatcagttccatcgtttcatgtgtagcaatcattccagtcttaattgcgtgaggtaattcatcatcaaatacgctatctaattgttctttaacccaactagtttctagattatggatatgttgaactcctttagtattttgagccacaatacttgtaatagcagccattccatatacgccacaagcatggaatgattttaaatctgccataactcctgcgccaccagaagggtcagtaccagcaattgttaacgcaatcttaggtttattcatgatttgctcctccaaaatcccattcttcatcaatgtatgccatattaaagaagtgacgttcatgtacagtactttgtaaaaatgcttctttaatttctcttttttcctgttcggtacaatgttctgtaagttcatttaacaaacggtcaaatacttcaattaaaggtgccatttcagtgctataaaaatcaaaccacttagcagtaagtgcatctctattaagatttgaatcttctaatccccatttagcaaccacttcatatacgtaaggacatggtgccattgcagctatagtgtatgcagcattttcgtgtgtataagcatgataatacatatgtttaatgtaatgatctccactaggtggccacactttttcttttacaatttcttcataaggttcattaatatagtccgctaaaatttcatgggcttctacttcgccgtctaacataaattcaatttgctctactaagaatttcacttctttcatagtaggtgctttaggaataagtaaagcatataaattagtaaattcttttaaataagaagcatcagcacgtaagtattggcgtactgcttgttttgataattttccctttaataaatcttgaataaaaccatcattataaatctcttcaataattggctttgacgcttgctttaattcatctgaaaaactcattaactattcctccttaaataaaaaaactacatttcaacgtagaaatgtagtcaatattcaaaaaaatagaatgaatgaatatgtattactactttcctacgttggcattaaccaaatcaggttataagggtctgaatgcttcatctcagccatgttccatggctcccctagtagtctttagtttaatttaaccataacaaaaccattgttataattcaaataaaaaagatattcattgaaataagtttaattcatacaactattattataaatataataaataaagaatagtacagaaatctttctaaattcagtcattactatcaatatatataaaaatgcctaagacaactcatattgtctcaggcactagtaaattatttattaagttttacgctgtaacccattgagatggacctgcagtattataaagttttactgccgcagcatcttgaacactttcaggtgcttgtgctggtgatacacctttatattgtgctggtgctactgaatcccaagtagattgtaagaattgatatttacctgctgcaccagaagaagggttgatggcatgaatatctccacctgattcgcgttgagcgatttgttgtaaatgactatttacatttacagatgaaccacttgttgattgtttaggttgatttgtagttgcattagcaggtgcttgttgtgtttgagttgcttgtttagtttgtgttgtttttggtgcttgttgtgtttgagcttcatttgcatagtgttgacttacatttgaagttgaagctgattgatttatatgattataattattattttggaaagatacattttgtgctgattgagttgaagctacattttgattagcactatttacagttgaaccgtttgatggataatattcccatttaaaatatgttccatctgaccaaaaatgataagttttaccatttaaattaaattggtaattataagctccttcttgaataggatgttgatttaatgattgatcgttagattccgctaattgagctaatttttctttattaatttgattttcacttgcatcagcatgacttacgtttcctgctactaatcctaagcctactgctaatgaagatgcaataattgtctttttcataatagtataatcctcctaagtcatttgttttcttaaatattttacggatactactctaacatctaaaaaagcttagcaggttacagtgaaataaaaaaaatatacttattttacattaaaattacatagatttgtaaataatttttcttatatatatactataaacactttaatggcagtgtttattagatatataataaaagaaccaactgtaattactttgtaatatttcagaaaaatacactgtcttttttatcattcaatgaatgagttgtatctaatgtcttatacatagttaaagaggctgggacataattcctaacaaaatagccagtaaatgagtttattataaattcatttactggcttctttatttacaatactacgtattgttggctcgctttcttaggggacagcttcagcctgttttttttttcaagcagaagacggcatacgagattcctctacgtctcgtgggctcggagatgtgtataagagacagatatattatttcccctaaaatatcatctttaatatatcttactccgactattttttattacatcattctttagaccgataaagtaaattttcaagcctgcttcattgtaaataaaagtttttaaacattatctttttatattaaaattaagttgtaattttagccaattagtaatacaatttatggctatgggagtaataattattattcttttatattaaaatggtatgattaaattattaacttatttttttaataaatacgtataggagcacataattatgaatcgttttttaaaatattttatgatgctattaacattattacttattgttgttcctgtcatttttattgtcaatttatatcatcattctgagaatgctttgcaatcttcatataataaatctgatgcaaaacgtcattctactttaagaaatagcaaaataaatccttctaaaaacgctatatcaatattatttcttgggatagacgataatgaaggtagacgtaaaaatggtcaaacgactgaacattcaagaactgattcaatgattttagcaacacttagtccaaataaacaacaaatccgtttattaagtattcctcgtgatacaatcagttatattcctaaagtaggttattacgataaaatcacacacgcacatgcctatggaggtcctattgctactatggatactgttgaagccacacttaatgtccctgtcgactattatgttcgaattaatatggatgcctttgttcaagcggtagataaattaggtggtatttattacgatgtaccttatgatttagatgaacctaacacagatgatactggaagaatcaaagttaaaaaagggtatcacaaattaaatggtgatgaagctttggctgtagcacgcacgcgtcatcacgattcagatttaaaacgtggcgagagacaaatggatttaatcaaaattttatttcagaaagcaaaaaatttagattcatatgacagactagatgaactcgttcaaatagtaggtaaaaatgctaaacataacctaacaacagaagaaattaaatcgatagcttcaatttatttatctgataatatagactttaaaaagtctcaacttaaaggtgacaatgattatttaaatggtatctactattatcaccctagcattaagagcatattaaaatattcaaatttattgcgttctgatttaggactatctaaaataacagataagaatgatttattggatgaaagagtcattaaacattatggcaatctagtaccgttaacacctattgattcgtttctgttagaaaatagtcaaaaagataccacaacagatgaaaactctattcaaaataatgatactaacccttctacgcaatcacaatcagaacaaaatccatctgatagtactatggttcagcaagatcaaacgagtaatcaagtcaatagcaacaatccagacaactcaaacgacttcaacaatcaaaatgaaataaatcaattatattaatttgagaggagcacgtagaatgtcacgcaaaacatatgaaaaaattgctaatattaacggtatgtttaacgtattagaacaacaaattattcatagtcaagacatggctttattcagaagtgaattcttttatgttaatcatgaacatcgtgaaaactatgaggcattattagtatactatggtgaaaattcagtgaatccaattgtaaatggagcttgttacattgttgctttacctgaaatttttaataaagtagatgtatttgaatctgatttacccttttcttgggtatatgatgaaaatggaattacagaaacaatgcaaagcattagtattcctttgcaatatttaattgcagctgctttagaggtgacagacgttaatctttttagaccttcaggtttcactatgggtatgaataactggaacatcgcacaattaaggatcttttggcaatattgcgcaattgttcgccaagaagcattataatttattactcctttttactttttagtaaaaggagttttttttctatatttaaataatataaaatgattctatacaatgattgagtttatttaatttaagagagtaggtaaatgtcacatgtttagagaagtaattaatcaatctatgctttctgactgttttgaaattagaaagtcagtttttgtagaagagcaaggggttccattagaaaacgaattagatgcatttgaaaatacttctactcatattattggatatcacgataatcatccatttgcttgtgcacgatttcgtccatatgaagatggtataaaagtagaacgtgtagcaattttaaaaccttatcgcaataaaggattcggtaaaacattaatgaacacgattgaaagtattgcaaaacgaaaacatcatcataaacttattttaaacgcacaactacaagctaaaccgttctatgaaaaactaggttatattagtattggtcttccttttcaagaagaaaatattgttcatattaaaatgtataaaataatttaaattatatttttcgatacttgaattccatttacaccagctagatattttttaaaaacaaaattaaatttagtttacaaattagttaaaaataattactcttacttttcttgacgttataataaaaaagtaaattaaaaaaggagcaactattatgtcgaaaaaatttagctttaaattcccatcaatgatcgcccttactttatttggtgcagcatttactacacatcatgctgaagcctctgaaaacaaacaagaggctgctaataatgtaatcgatgatcaacaaaatattgaaaatgccaatgtagctaaacatcaagtcagtaatgcagctcaaaatatctctggggtgcaaacttaccaagaccctacattagtaaaatcaaatactactaataatacatacacatatgatgcaaaattagatcacttaaatcaatcagcgtcatctcaaaataactcaacgcgttctaatactaatgatacacttaaaaacaatgatacaatttcaaattatcaatctgataatacaaaacataataataatgaagtagctactacctctactacttcaactgattcaactaaattagttacatcagcagagtctaataataaaataaattcaaatcatgtaactactgaaacacaaccaactcataatgaaagtgctcaagtttcaaatacacaaaagttaaatacagatgagcctaaaacaacattaaataacgtagatagtcaaaacaatagcatatcaaaaactcaatcaagcactactttcgttaataataagcaacaaaaagtagatgatgatacgacaacgacaaataatgacaataataaagtatcaacatcttctacttctactactgaaagtgacagtacgtctaacaatttatcaaataaatcagacaacactacagttaacaatgaagatactactcttcaaaataataatactcaaacttcaccaatgcataatactttaaaagtacgtgcatacagtgcagctttaaataatactaatgttaataataaaactacaacttcaactcaatcaaatgatgcatctgtctctgactctacatcatcagtgtataaaggtatcggtggaaaaggtggtccagctacagtaagtacatattcaactacttcttcactaccaaaatatgtaccacaagttaaatcttcaattaataattatattcgctcaaataatttgaaagctccttcgattgaagaacattatacatcttacttccctaaatatgggtatcgaaatggagtaggaaaacctgaaggcatcgtcgtgcatgatactgcaaatgacaattcaacgattgaaggcgaaattaattatatgagaaataattatacaaatgcgtttgtacatgcatttgtagatggaaatcgtattattgaaactgcccctactgattatttatcttggggagctggaccatatggaaataatcgttttattaatgttgaaattgttcatacacatgattatgcttcatttgcacgttcaatgaataactatgcagattacgctgctacacaattacaatattatggattaaaaccagatagtgctgaatatgatgctaaaggaacagtatggactcattatgctattagtcgttatcttggaggtacagatcacgctgatccacatgcctacttgagtaatcataattatagttatgatgaattatatgatttaattaacgaaaaatatttaattaaaatgggtaaagttgcaccatggggtacaacatctacaaataattcaactcctactactaaaccaagtgtaaataataaaaaattaacagtaacatctaataatggcttagctcaaattaaatcagataatagcggtctttatactactgtatatgattctaagggaaaaacaacgaatcaagttcataatactttagcagttacaaaatctgcacagcttggtaaagataaatattacctagtatccgattataatagtggaaaattatatggatgggttaaacaaagtgaaacgatttataatactactacttctaaaacaaaagtaaataaatcgtatactattaaacctggaacgacactatacacggttccatggggtaattataatcaaattgctggaacagtatctaaatcaaatcaatctccatttaaagcgagtgcatcacaacaagtaggtaaatcaacttatgtatatggttcagtaaatggtttaactggttgggtaagtaaatattatttaaatgatattcaaaacaaagcggatacaactaatgtacttaatgtttctcaattaaataacactttaggacaagtagctaaaaaaaatagtggtgcttacacaacagtatatgactcatcaggaaaaataaatccttctattaacggtaatacttatcgtgtaactaaaaaagcgacattaaataataaaaacttttatttgatttctgactttaatggtaatcaatcacacggttggattccttcatcagaaattaatattcaaactacaacacctataaatgatggtattaaaaattacaatatcaaaggaaatagtaatatatatgaaacaccttggggcagttcgtctcaaattaaagcaactgttccttcaaagggagatgttctaaaatctatagacgctttaaaagtaggctcaaatacgtatcttcacggtgttatcaataatgtttggggctggattttatcagacgatgttcaaactgtaaaaacgagtcaaaaaacaagtagtgttcaaactgtttcaaaaattgctcaagtaaattcaacaaatgatggtatacgttcaagtatttacgatgcaagtggtaagcatgcaaagcaatatgctaacaaaacatatgttgtaactaaagaaaaaaaattagatgataatacatatgttttattatctagtacttctggaaataccccattaggttggtataatgttaaagacttaaatattaaaaatttagataaagaacaaaaagtgaaaggtacttatactgtcaatcaaaataataagggcttgtatacgattgcttggggcactaatcaacaacgattagataaaaacaacattgctaatcaaactttcacagcttctaaatcgacaattgttgatggtaaaacgtatttatacggtacagttaataatcaaacaggttggattgcactaaatgatttaactaacgcttcatctttcgatacagtagaagactataacgatgatttagttataactaatggtaatagtttttactatgacgaccctacttcagctaaagggtacttactcaagccatttaatgaacaaatttttcaagttacaaaacgaaaagtagtaaatggtatcacttggtattatggtaaattaagtaatggtaaatcagtatggattaagaaaagcgatttacaacaacaattagttaaactatctaaaaactatagaacacttgatgatgtcactaaaattcaacaaaatgtttacggtgcaccaccacaagttcaacgtaataatagcggttggtcaaatgcaacgtatagtgaaattaaaaatgcgatgaacgcgaaaatacttgctaaacatccaactttaaaatatcaatttttacgtttagatcgcccacaatcattatctgtagatcgtttaaatcgactacttaaaggtaagggaatgttagaaaaccaaggtcaagcatttgctaatgctgcaaaattgacaggtgttaatgaaatttacttaattgctcatgccctacttgaaacgggtaatggccaatctaaacttgctaaaggtgcaaatttggttaataatcaagtcgtttctaattcccctattaaatactataatgtatatggtattggtgcttatgattatgcaccacttgtaaatggaattaattacgcaaaacgatctggctggaatagtatttctaaagctattattgatggagctaaatttattgctcaagattatattaaatctggtcaaaatacactttataaaatgcgttggaatcctgatcaacctggtacacatcaatatgctactgatattaattgggcaaatgtgaatgctgaaggtttaaaatacttatacgatcaaattaattcagttggtaaatattttgaaataccagtatttaatcaataatactacttgggagtgagactgaattcagttgcccttcagttatcgcctacccatacttaaaagaatctgagacacttatttctgtctcagattcttttttgctctaaattttatatttcatacaagcacccatcttattggactatgttataaagaacaataagatgggtgctatgttagatataaagatgacgactattaagtttatttaaaagatgattcaaattattgatttcctcttctgttaaacattgacatctcgcttcgattaattcacatcttgctatattgatttgtttaattaaatctctagcttcagttgttaaacataaatccttacaacgtaaatcttcgtgtgactgttgacttgtaatataacctttatgaactaatttctttatccaacgagatacaatggactgctctctactaatcttcattgttaaatcatattgtgataatcgatcatagttataaagaattcttaataattccagttggtcatttgttatatcagtccgttggccaaagcgtctatttactaaattaagatcattgtttgttagggtaataagtttttctagttgattatacatagctgttctactccactctagtaattgtttatattataaagttaattttataattagacaatactattcaataaattgactaaattcattttaataatatgatattatctattcattatacacgatttctaatttttctatttaaattgagagaaaatgagattttattaattaaatattataaataaaaatatgatatgataattatattctatttcaaagtaatgaggtcataatactttgaatgattatatttagaggtgtaaatatgaaattaactttaaattcaaattctaagtttttaagagcgccaagtatccgacagttttcaagtcgaataaaaaatattgacgactgtgttaatttaactattggccaacctgattttccaatgcctgatgtggttaagcaagcatatattaatgcaataagtgaagataaaacaagttattcacataacaaaggtcttactgaaacgcgtcaagcgattagtcaatattttaaacgtagatatggatttttttatagcgaagaagaaattattgttacaaacggtgcaagtgaagcgttagatacatcgctaagaagtataatcgaacctggagatgaaattttaatccctggtcctatttatgccggatatattccattagttgaaactttaggtggtaaacctatttatattgataccacacattctgactttaaggtaacacctgagctaattgaaacttactttactaatcaaactaaagcaattttattaaattaccctactaatccaactggtgttatattagagcgctcagaagttgaagcccttgtacattatttaaaaactaaagaaatatttattatcagtgatgaaatatatgctgaaaatacgtttacaggaacacatacttctttcgcagaatatgaagagatacgtgaccaactattactcattggcggcttaagtaaatcacattcagctacaggcatccgtatcggttttttaatcggtcctgaatatttaattgaaaaattaactttcatgcatgcatataactgtatttgtgctaatgttcctgctcaaattgcttgtatcactgcattaaatgagggcttagaagcaccaaaatatatgaacgaagcttatattgaacgccgtgattatttaaaagctaaattgttatctctaggattcgaacttgaagctcaacctgaaggtgcattttatattttcccaagtattaaacgattcactaataatgattttgacttttgtgtcaatgtactggaagaggcacatgttgcgatggtgccaggctcttctttcacagatataggaaaaggctatattcgtatttcttatgcttatgaaatgaacgtcttaaaagaaggtatgcgtcgtttagaattatatttaaaagaacactatcctaacgtgttagataattaaaaaaaacgcaagattgactaagtcaattttgcgtttttttattactattatttatgggaatttagggaattgatcaaaatcaggatcgcgtttttctttaaatgcgtcacgaccttcttttgcttcatcagtagtataatacagtaatgtagcatctccagccatttgttgtaaaccagctaaaccatctgtatctgcattcattgcagcttttaagaaacgtaatgctgttggtgaatgtttcataatgtctttacaccaagctactgtttcatcttctactttatctaaaggtactacagtattaactaagcccatttctaatgcctcttgagcattgtattgacgacataagtaccaaatttcacgtgcttttttgtggcctacgatacgagctaagtatcctgaaccataaccagcatcaaatgaacctactttaggtccagtttgaccaaagattgcattatctgcagcaattgttaagtcacatactacatttaatacgttacctccaccaattgcataacctctaaccattgcaataactggtttaggaataacacgaattaaacgttgtaaatccaatacatttaaacgaggaatttggtcttcaccaacataaccaccatgtccacgtttcttttgatctccgcctgaacaaaacgctttatcgccttcacctgttaagataataacagaaacattttgatcatcacgtgctctagtaaatgcatcaatcatttcagctactgttttaggtgtaaatgcattacgtacttctggtcggttaattgttacttttgcaattccttcgaagaattcatatttaatttcatcatattcttttagtgtttcccactgtctagtcattttgctcctcctttaaaaagcctaatactattgtatcaaattccgcttcatcttccacatgaattgtgtgacctacattttttaaaatacgaatttgatagtttttaatttcttgtgccatttttttagcagtattaacgaatttttcatctaattctcctgctagaataaggcaatcactttttatacgcttaatatctccccataaattaggcatatgtccagtcccataatctcttaaagctttcgctaatttattaggatcctgcgaaagtcgcatacgacgcattgcctgttttttattatcatctaatagatattgtgtttgaaataaagggagtttttcccaatcatttacaaacacttcaattccagctatttctaatacacgtccacgtgcttgatcgatagcctgtcgttctttacgtaaggcttcgtcagcaatgcctggcgatgtactttctaatattaactgtttgatttcatattgaccatatattgtatagtaaagtgctacgcgcccacccattgaatagcctaataaactgaatttatatttctcaaattgagataaaactcgatttatttgttccgttatatacggaaagtcccatgtttgatctataggtgagtcatctttgccatgtccaggtaaatcaatagttaaaatattacattgagtaagaaaagcctctatatgattcatatacgtttgactatcactaataaaaccatgaagtaaaattaataattgattgcttggatgatcagatttataaaaattataatgtaacatttaaaatctcactcaatttctgatataaaagttgatgttgttctaagttatcttcacgatttgtaatcatttcatatatatatgaattcatatttgaaaatgatacttgagaaaaatcggtaatattattcaaacgtttaaatgaaaaatcatataacatggcagtatactcaaaatttagtccagttggtgtaccaaatagacgttcaaagtattgctctgctgctgttttttgaggcaaataagaaaatatacctccaccatcgttgttaagtataacaatattaatatgaatatcgtttaatttagccattaataatccattcatatcatgataaaaagctaaatctccaatcagtaatgtcactcttttatgtactgccatacctaaagcagtagaaataacgccatcaataccatttgcacctcgattagcatacacttctacttcactatcaaataataaattatctacatcacgaataggcatactattacttacaaataatgcatcatctttagtgagtttttgaatcagtgtacttacaaatgctgattcatctgtcgcttgagacatatgttgagtgattgctttacgagattgtgcttctatagattgccaacgttcaatccaatccttacgatttactgttggttcattcactaaacttctgaagaaatcatttgctgatatttcatatgagatgtgtggcggtgttggaaatacatcaattttatcattattttgaactaatatttgaaatgcatttgtgcgtgtaagccattgatttaattttttagaaataactggtttacctacacgtataataaaatcagcatcaatatttaaatgagaacggtataataaatcatatgttgtaataacattaggatggttaaacttgcgtaattgactaagtggatctgcaagaattggtaaatcatgaattgtagcgtaagttaaaatttgatcgactgcttggtgctgcatatcccctacaataataagacctttcttatcttttaatacattttttatatcttgtatatctatatttttttgataatgaggcaatattttatgttcagattttaaattctcagtcatttcaagatctggtgttaacggttctctaaatggtaaattaaaatgtattggaccacggtgtggaccatataaatattgacttgcaatttgcatttgataattgatagtattgagcatttcttgactgccatcagctacaggcatatcaaattggaagttaatataatttgcaaacatattgacttggttaatcgcttgtggtgcgcctacacttctaagttcgtgtggacgatcgctagttaatactataagcggtatacggctgatttgactttcggctatagctggcgtgtaattagcagccgctgttccagaagtacataaaatcgcaactggacgttcgcttcctttaattaatcctaaagcaaaaaaagctgcgctacgttcatcaggatgtatccaagtttttatatttggatgcgcttcaaatgcaatcgctaaaggagtcgaacgtgagcccggactaataacgacttctcgcacaccataggcatataactctgatgcaaatgtataaacttgtttagttaaagcttctttatgattcattctcattcactactcctaaagcattcatcattggtgaaaatttcaccgacgtttcttcaacttcactttcagcattagaatcttttacgataccacaacctgcaaataaagtagtttgattttgtttaattaacatagaacgaatagccacaataaattcacaatcatcatctacatcgatatatccaactggagacccatataatcctcgtgtaccaaactcatttttttcaatataatcaactgcttctttcttaggataaccacctaaggcaggtgtaggatgcaactcatcaattaaactaatatacgaatgattcaataatgttccttttatttcagtatacaaatgatacatatgatcattttttaaaatattaggtttttgattgtactctacattttctacataaggttcaatatcatttaaaatacttctaacgacaaattgatgttcacctagatttttactgtcttgtagaaatgcttgaacatttttttcatctttttcagcatcttgtgttcgaggaatggttcctgctacagccttcgtagataatacaccgtcttcaacttttaataattgctctggtgtttgagagaagaatacagattggttagactctagaataaataagtaactatttttctcattgtttaacgcacgattaagtacataaggaatactaattggcttatcaaacttaattaaacgacgtctcgcaagcactactttttgatctttatcaagttgttcaatcgtatgacttacaagatctttccactcatcaacataaatatcttccatgcgtgttacattgcctaaagctgtctctcgttctgtcgtatcgacttgagtattttcaaaataattaataatttgatttaatttttccatttcaaattgagctttttcaactgtatatgtcaaaatggtttgattgttaactgaagaaataagtacttcaggtaccacaaaatgattaatcccaaattcacgccactcatcatcagacttatgatttgaaaattggaatccccctactattttaaggtgatgcttttgcgtattaacatgaattagttctacatcgtttttaaatttttcccattcccgaaagatagattgtttattttcaaagttattcttaaacctttgaattgcatgatagccgaaaaatgaagacatattatcgtttaatcgcaaataaaatcgatctccagcttgtttttcagttaaattaaataattcacttggtgttaaagatttatttaacacgacttcaacagaaacccagtttttattgctttcatatatagattccataattttgtcttccattaggttggcagccattcatttcacttctttcattatctttttttactcattaaagtattgtaacatttttcgttattcatcgtatcataattgcttaatcaatttagagaaatatttcacgttgattgacctttcttacctattcctataaaatacatatgttaaaactttatattataagaggtagattacattatggcagatcaatatcaacaatattcaactgttagaaaatattggcatttaatgagacctcatactttaaccgcgtctattgtccctgtattagtaggaacagcgacagctaaacttttcttactgggcagtcaagatcatattaaattcagcctattcttagcaatgttaatcgcatgccttttaattcaagcagcgactaatatgtttaatgaatattatgattttaaaaaaggattagacgatcatacatctgtaggcatcggtggcgcgattgttcgaaatggtatgagtccaaaacttgtcatgaatctagcaattgctttttatattattgccgctttacttggtatatatctagctgttaatagttcattttggattattccagttggtattgtatgtatggcaattggttatttatatactggtggacctattcctatttcatggacgccatttggtgaattattctccggattatttatgggtatgattatcattttacttgcattctttattcaaacaggtaatgtgaatggttttattgtttggattagcttacctattgtcattacaatcgggttaattaatatggctaataacattcgtgaccgtgttaaagataaagcaagtggtcgtaaaaccttatctattttattaggtaaaaaagcttctattacgtttatggcagcaatgtatatcttagcttacttaatcgtaatatttactgctttattcaaatcaggcggctcattattctacttgttagtattattctcattcccaatgccaatcaaagcaattcgtcgttttaataaaaatgatacaccagcaagcatgatgccagcgatggcagcgactggcaaaacgaatacagtctttggtattttgtacgctttgggtatttatatcagcgcacttttaggtggaatctaatttgttttaactagcattgtgttttaacaatgctagtttttttattattatatatatatcatatgtagataatcatggccatataaattaatatcttcaacccatttgaaacctagttgtttataaagtttaagtgctttctcattattataatcacaatttaaactccattttttattaaaacttgtggtgatcaagtgttccaacaattgtgtcgcaataccttgtcctctataatcaggcgatgtgaccactgcttcaatataccactcatcatttttagcttcttttataggtaaaggtgttccaactaatctgatatcttcttcaagaggcagttggttccattgttcttcgtactccatttcttttgaaccatcataagcgataatacaaccggccacttcattattcttttcatatacccatatatttttataataggtacgataatgtacattaactatactaagttcaagcaaattaatcatacgttttttagaaatttcctttacaatgtcaagttccatatctttccatattaaataataaagttttgcaatttgcttattatcacttggtgtcgcttttctaatcatatttatccctccatctacatcatactcatattattacaagaaattaaatattatagtaagtataaactgattcttttataagtgacgttcttgattttagtcataaattacttacaatatgaaaataaggaggcatccataatatgagagtaaacaaaacattgtatgtattatgtgcattgttcttaggtggtgttgggattcacaagttctatgcggataaagttggacaaggcgtattacatttggtctttttttggacacttattccaacaattatttcggttattcatggcatgatcattattttcactactacagctgataataatggatatatttttatacccagataaaaaacaaccaaaagtatttaaactttcatctttaaattaaagaaaatggggtataaattaataatagttttaaaaaggagaatgtgactatgaaaaactttattaaacgtattgtgagaacaattattacaggatatgtattaaaatggattaaaaataaaatagaaggaaattcaaaaagaaaataatttaaaaaggtctattcactttattttagagaatagacctttttataatgactcattggaaccggatttactcattgagaaatgcctccaaatgttttaattcagtagtgtattgattaaaatcatcttcatttctattaaccaaagcttcatcaattaatgttacaagttgtttctttctttctaaacgtaacgcttcgtcaatcacaagttctacacctaaatcattcaccgtcgttacaaattcttctagtgtggtatgtttaacatttgtattgtaatacataagattcactacctttctattaatttaaaaatagtatacaagctttttattttgaaatcaatgaatattcagacttttctaaataaattagtgtaattttatttttaaataataacttgacaacatatactttttttatataataattttatattattaatcactcttcgtgtttaataataaataattaaataaggagctgatcttatgactcagttcaataaacctcctaatacgatttatgtcatacgtaaaggtgatatggtgattagacctacatttgacgatcatcaacaaccgaacggctcagaaatcctcaaattcgatacctcacgagaaataagtccttttaaaactcaaaaaattattgaacgatcttgtagattttatggcaataactacttaagcaagaaagctgaaactcaacgcattgctggaataactagtaaacctcccatccttctcacaccattgtttccaacttactttttcccaacacattcagaccgtttagaagaaaatatatggattaatatgcattatatttctgatattaagccattaaaaaacagaaagagtaaaattatctttgcaaatcaagaagcactaacattaaatgtatcttttcatagtttatggcatcaatattctaattctattttctattactatatgattgataaacaagcaagaatgaaatctaataatccagatatgccaatcgattatgaaaaaacatctttaaatatttttgaggcactttcacactattctttattagaagataaatagctgtatgtttatttttaaaatatacggaacgattatattaatttagtgtaaatgttccgtatattttttaaagattatctcttgcaaattttaagattattgatataattgtatttgtgttgattgaagaacacgttatattattccgcagtagctcagtggtagagctatcggctgttaaccgatcggtcgtaggttcgaatcctacctgcggagccatatggaaacgtactcaagttggctgaagaggcgcccctgctaagggtgtaggtcgcgagagcggcgcgagggttcgaatccctccgtttccgtcatttgactctttactttttaagtaaagagtttttttttataaaaaaagagccaatgtttctacaatttgactccttttttatatttaaactaatacgccattaacttcaatatactgtctttatcaatatcaccaaagtaatgataaaagtcatagtcttccattacttcttttatatgagtataatcgtgtaatgtgcctactaaagcatcttctaattcattgacatttccttctccaaagaaatcgccaaagattttagcatgctcaatttttccttttttgacatcaaatttaatttgaatgaatcctttttcaaacttctcgtcacgttcaaaattatatttcggatttttaccataattccaatcccaagtgcgatatttttcattgcttaattgcttaatactgttccagtcttcttccgttaaatgatattcctctacttcatgctcaccaaagatattttttaaaataatttgcttaaattgatcaattgtaatagagtcatctaaaaattcttcaatatttgctacgcgtttacgtacagacttcacacctttagattgaatttttttaggattcacttttaatgcgttttgtacttcttctaaatcactatttagcattaatgtaccatgactaaacatacgatttttaaccttaaccatagcatttccagaaattttagctgtgcctacttgaatgtcattacggcctgtcatttctgcatctacacccatagattgtaaagcttgaacaataggctcagtaaatttcttgaagttatgaaaactgttaccatcatcactcgttacaaaactaaaattcaaattgcctttatcatggtacacagctcctcctccagaaattcgtcgtacaacatgaatatgatgctcatctacatactgtttattaacttcttcaattgtattttgatttttacctacaatgattgagggttcattaacataaaataaaaagtaactatcatctgcaggtaaatatttaagtacatactcttccatggctaagttaattgtaggatcagtaatattattattacttacaaatttcatagctctcacctttctctttcttttaaaatttaataatgcaatatatcttccactatcgattatttaacttaattatggcattattttcaaaaataatataatattttctgattttagtatatatttgtttatttgtagtgtaaattttagtacaatatagtctagctatgatttgaggaggactcgaaatgactgttgcagaagttggaaatattgtagaattttatgacggtttaagaggccgtgttgaaaaaattaatgataattcagttattgttgatttgacaattatggaaaattttaatgaactagatttacctgaaaaaacagttattaatcacaaacgatataaaatcgttgaataagaaggttaatattaaatgaaaaatacatctaaacccttaatttggtttgttgcaagttttattgtatttcatcttatcttatttataatgtggggagaacatcaagaatattggtatttatatactggtataatgttaattgctggcattagttatgtattttatcaacgtgatatcacatcaaaacgtctattaacctctattggtgtgggcgtaatcacaggtgttgtattagtgataatacaacttatattttcacttatatcgtcacaaattacttataccgaattaattaaagagttatcaagaacaggtgtatattttaaatggcaaatgttagttactatcttatttgtcatcccttgtcatgagttatacatgcgtgctgtcttacaaaaagagttaaataaatttagactacctcgctggctaacaattttaatacctgcattatgttctagttctttatttatctatcttgataaatggtggattgttatttttatctttatagctcaagtcatattatcattgagttatcagtatacaagacgtattgttacatcgtctttaggtcaaattgttgccatcattttattacttatttttcatggataaaaaccttttcttagttgctaaaactaagaaaaggtttttttgattggtatcacgattcatttcaataacgatattactttttcatttaaaacataactatctatatacaaaaaagagtgggataacgaattcaaatgaatgtatcccactttcctttctctgtttatccaatttgaattctttcttttggataactaaatttatcaggttctttacgcccagatatcataataataaatgatattaaaccgacacgtcctataaacataagaagcattaagactaccttagtaatactgctaatattatctgtcaccccaagtgataggccacatgttccaaatgcagacatgacttcaaaaaatacctgtaagaatgataaattattggcttctgctgctaatataataatgatacttacaaaagtaagtactgtcgccattataaacacagcaaaagaacgctgtatatcgatggtatgaatttctctattaaatactttaatcgatgatttttctgtattgttattaaaattaatcacaaataaaataagtatcgcaaatgtcgttgttcgaatacctcctcctactgaactcggagaagatccaataaacatgagaatactcataatgacatttgttgcatcactaaagtgtgtcacatcaatggtttgtaatccagcactacgtgtagttgcagattgaaataatgcatagaataaagattgatgccaattatatcctttgaatgcatgattgtactcaagtgctaaaatagataaaaatccagatataaataggaaaaagtaagtcgttgttgtaattttagtaaataaagaaaatctaaaatgacttactctatttcgtatataagctctgatttcaagtaatactggaaaaccaattgatccaagaataattaaaaacattacaatagtttgtacaaagtaatccttggcatatggaactagtgattggccagtaatatctaacccaccatttgtagtagctgaaatagatacaaacaaaccttgcattaaagcattttttaaatcaggattgtctctgtaaaaataaaatgcaagcaagagtgcacctacaatttcgatagtcatgatggttttaacaatttcaataataagcttaactgtcccactcattgtgtctttattattatcaagcatgataagttgacgttcgcgcataccaatgtgtttaccaagtactacccacaacactgtacctatcgccattacgcctatgccaccgatgtttaagataattaaaatgataagttggccaaatgatgaataggtatcaataatactgactggcgttaaaccggtcacactaattccagatacagctacaaacaacgtatctataggacttaccttcacgccaggtttatgtacaaaaggtaaattgagtaataaaaatgcaacgacaattgcaattaaataatataaaacaataccttgttgaggcgttgattttttgaataatttactgaaaatagacattagtttgtcacctcaatgtcatttcaaattaatttctatatcttgaatatttccatctctgtaaattttagccgttaacgtttttaaatcttgtcgatggttaaacaggatgtgtctatactgcaaattatcttttaatgttttaccttctaattttacaatgacatcaccaatttttaaacctgattttttacctaaaccgtcatcttttaattttttcactaaaatcccatcatttatatcattaggtaattttaaaagtgagcgttcataatgatttaaatcatttacattttctaaagctattccagtattggggtaatttactttcccatttttctcaagctctttagcgattgatttagcttcattaatgggaatagcaaaacccattccttctatacttggcatattaatttttaatgaaacgataccaataagctctccatctttattaactacagccccacctgaatttcctggattaacagaagcatcaatttggaacgtttgcatcaattcatcatttttattatctttatcaaaatcaacaggaaccaaccgatttagccccgaaataatccctttagataccgtatttctaaactcttctcctagaggattacctacaattaatatcgattcccctaaaactaatttatttgaatttccaatatggataggtttaatatttttattattgatgtttgcttttactactgcaatatctgaccatttatcctttccgaccacgtcaccttttatacttttattctctccatatgtaatcttaactttatctgcttcaccaacaatatgtgtatttgttaatacaaaaaaagtatcgcctacagttttgtagacgacacctgagccaagttcactatctaattttgaatttgttttttgaactgaagtattcttaggtgcgtcactttctactgttaccactgatctgacagtattattagcgtttttcatagttgttgtgtacttcttatcttgtgtatgtgtttgatttgaatgttgttcttgtgaaggttcagtaaaaatagcttttactaaaactaaaattaatattaacgcaattgcgattaaaattttaatccaatgttcttttaaaaagtcaacgactttattttttgtatcatttgatgattgttcatgtgattcatgagattgttgatccgatatattttctgtcgtattcttatcagaattagatatgtgctttgattgttcactcttagtatgttctacttgagttgaacgttgctgagttgacatttgttctttctcagtatggattgattctttatccttagttgaagtgtatgattcttcagtgattgttggatgtttagattgtgttttaattgtatcattatgttgattgtctttttcttgtttagactttggacgagattcattatttttattcaatctactataagttggttctatagatttattcgtttcattttcactttttgagccattactcgaaattggtttttgctgtttcaattcctcattatgtatgtcttcttgtttaaggtgttgttcttcaggcagagttaaatgatgcctattatttttcttagctgtgtttgatgcatctctttttgatcttaacttagctaaatgttgttgttgttgaatttcttcttgtgttaatttctcaattctagcttttcttaaattatctttgacacgttcttcatttacttttgcttgatgctgttctttttctgctaaatgttcacgcttttgtctttcacgttcaatacgttcctcacgttcttcattatgaaagtattcgtgacgtttacgcccatatttactacgcggtatcacttgttttttatcattatccaaagatgcccactcctaaccttgaaatcacaatatatatcactaaaaaatgatttacttttatgtggttatatatctatcttaatttatttatatattacttaaattttaatatcattagtgttaataagcaaacgatgagtccgggacataaagtatctagataagtgaaaaaagacaatttctattgaaataatatagaaattgtcttttttataatttttttgattattttcagctcgttgagctgttacttttcttatatcattcatttgtctggtgacaatggcaaggaggtcacacctgttcccatgccgaacacagaagttaagctccttagcgccgatggtagttggactgacgttccgctagagtaggacgttgccaggcatatatattattccgcagtagctcagtggtagagctatcggctgttaaccgatcggtcgtaggttcgaatcctacctgcggagccatggctccttggtcaagcggttaagacaccgccctttcacggcggtaacacgggttcgagtcccgtaggagtcatttatttggagaattagctcagctgggagagcatctgccttacaagcagagggtcggcggttcgaacccgtcattctccaccatttaaatatcggaggggtagcgaagtggctaaacgcggcggactgtaaatccgctccttcgggttcggcagttcgaatctgcccccctccaccatcttattgggctatagccaagcggtaaggcaacggactttgactccgtcacgcgctggttcgaatccagctagcccagccataagagccattagctcagttggtagagcatctgacttttaatcagagggtcagaggttcgaatcctctatggctcactttaagcactccttaatggggtgcttttttattatccatttttagtagtgattttcatgaaaaatttataagtatgactttcatagtatgacagttacacctttcattggtataattatgagtatgaaagttatagacggaggagagattatggatttttccaacttttttaataatcttagtactttgaagattattacaagtatattagatatacttattgtctggtatgtcctttatcttctcattactgtatttaaaggaactaaagcaattcaattgcttaaaggtatattatttatagttattggacaacaagtaagtaaacttctcaatttaactgctacctcaaagttatttgatattgtgattcaatggggcgttttagctttaattgtgatattccaaccagaaattagacgagcacttgagcaattagggcgagggagcctatttaaacgctatactaatacttacagtcatgatgaagaaaaattaatccaatctgtatcaaaggctgttcagtatatggctaaaagacgaattggagcattaattgtttttgaaaaggaaactggattgcaagactatattgaaactggtatatcaatgaattctgcaatatctcaagaattattgataaatgtttttatacctaatacaccattacatgatggggctatgattattcaaaacactaaaattgctagtgctgcatgttatttaccactttcagatagtaataaaatttctaaaagtttaggtacaagacatagggcagccgtaggaatttctgaagtttcggactcatttactgtggtagtatctgaagaaaccggttcaatatcagttactttcgatggtaaattaagacgtgatgtttctgatgaagtattcgaagagttattagctgaacattggtttggaactcgcgctcaaaagaagggtgtgaaatagcatgttagaaagtaagtggggattaagattttttgccttaatattagcgatctttttttatctttctgttaataatgtgtttggcaatatttttaacaatgataatctagctcagaattcttctaaaacaattgaagatgtacctgtagaaattctttataataccaaaaatttacatgttactaaatcaccagatactgttgatgttactatttcaggaccacaatcaaagttattgaaaatagaaagttcagacgatatcaaggtcacagttaatttatctaatgctaaatctggaaattataaagaagattatattgttaaaggattaagtaacgatattagttataatgttaaacctaaacacgcttatatcaccttggaggataaagatactaaaacaatgcatgttcagcctgatatttcacaaaacaatgtagattcaaattataaagtaagtgaaacttctttgaataaagacactgttcaagttactggtggtaaaaagcaattagacaaaattgcatatttaaaagcgacatttaaaaatgcgactaatatcagtgagaatactactgatgtagctgaaattactgcatttgacaagcaattgaataaattaaacgttcaaatcaagcctaataatattaaaatgtcagtgaaacttgaaccttacagtaaaaaagtaaaaattaaaaccgttaaaaaaggttcattacctgatgatgaaagtttagatagcattaaactaaatgagaatgaagtagaaatttatggtaataaagatgatttgaaggatattaatgacatagaagccgatgtcaatttagatgatatcactgaatcgactgataaaacacttcaactcaagatacctaaacaggttaagaaatctgaatttaatgaagtcacagcacatgtcaatttaaaatagtaaactagataataaaggagtaatgaaaatgggaaaatattttggaacagatggtgtaaggggagtagctaataaagaattaacacctgaattagcgtttaaactaggtcgctatggtggttatgtattagcacataatgaaggagagaaacatcctagagttttagttggtagagatactcgtgtgtctggtgaaatgttagaatcagctttaatcgctggattagcatcaataggtgcagaagtaatgagattaggagttatttctactccaggtgttgcatatttaacacgtgaaatgggagcacaattaggagtaatgatttctgcctctcataatcctgtagctgataatggtattaagttctttggtgctgatggttttaaactttcagataagcaggaagaagaaattgaacaattattagatcaagaacaacctgacttaccacgtccagcaggcaaagacattatgcatttttcagattattatgaaggtgcacaaaaatacttaagttatcttaaatctacaattgatataaatttagatggacttaaaattactttagatggggcgaatggatcaacttcttcacttgcgcctttcttatttggtgatttagaggcaacgacagttacaattggttgtaatccagatggatacaatattaatgatgaatgtgggtctactcatcctgaacatttagctgaaaaagttgtagaaactgaaagtgattttggtttagcttttgatggagatggagatcgtttaattgctgttgatgaaaagggtaacatcattgatggtgaccaaattatgtttattattggtcaagaaatgcataaaaatcatgaattaaataataatatgattgtatctactgtaatgagtaacttaggattttataaagctcttgaaacagaaggcattcaatcaaataaaacaaaagttggagatagatatgtcgttgaagaaatgagacgaggccattataatttaggcggagaacaatctggacatatagtaatgatggactataacacgactggtgatggactactaactggagtacaacttgctgctattattaaatcaagtggtaaaactttaagtgagttagcagcacaaatgaaaaagtatccacaatcattaattaatgtaaaagtaacagataaacatcatgtatctgaaaatgaagacgttaaagctgttatgaatgaagttgagaatgaaatgaatggtgaaggaagaatattagttagaccttcaggaactgaaccattagtaagagtaatggttgaggcagcaacaaatgaagatgctgaacgttatgctcaaacaattgctgataaagtaaaagaaaaaatgggattaaattaatagtaccatttaaaaacaagaatacactctctttaaagttaaagccgtagaactgaaaactttaaagagagtatttttttagcaaaaaatataaattaaatatcaaattataactataagtttatgaattaaatataataatatttgcaaataattattagaaaagggtaaaatagagagtattggaagaaaggaggatagatgtaataaaaataaaataaagcgcctggacaaataattaaaatgttaaccatttagtattaattaagagaatgctaatagacatattaattatattgtagacgaggagaatagttatcgatataatcggcggatgctattccggatgtggcacattcgttagcttattatttaaaacatataggtaactagatgtacaaatataataagaacgccaaatagaaaacatagaaatatgatgtttagaatccaatacaataaaacgagcaatgtctaattaaaaaattttatataacagataaaattatcatatgactatgtaatggaggaaaaagaaatatgtgcggaattgttggatatattggctttgataatgccaaagaattattactatctggtttagaaaaattagagtatagaggatatgattcagcaggaattgctgttgtcaatgatgaagggactactgtatttaaggaaaaaggtcgtattgcagaattaagaaaagtagcagatagcaatgacattgatggtcacattggtattggtcatactcgatgggctactcatggggtacctagtcatattaattcacatcctcatcaatcaaataatggacgtttcactttagtgcataatggtgtaattgaaaattatgaagaactaaaaagcgaatacttatcagatgtaacgtttaaatcagaaactgatacagaagttatcgttcaattagtagaatatttttcaaataaaggtttagaaactgaagaagcattcactaaagcagtatctttattagatggatcgtatgctttaggtatgttagattctgaggatgaagacactatttatgtagctaaaaataaatcacctttacttgttggtattggtgacgactttaatgttattgcttcagatgcattagcaatgattaaagttacaaatcaatataaagaaattcacgatcatgaaattgttattgttaaaaaagaaagtgtaacaattaaagataaagatggaaatattcaagatcgcccaacgtatactgctcaaatagatgcatcagatgctgaaaaaggtatttatgatcactatatgttaaaagaaattaatgaacagccagcagtaatgcgtcgtattattcaagaatacgaagatgaaaatggagatttaaatattgattctgaaattattaaagatgtatcgaatgcagatcgcatttatattattgctgcaggaacaagttatcatgctggtttagttggtaaagaataccttgaaaaactatctggagtgccaactgaagttcatgtggcatcagaatttgtttataacatgccattattatctgaaaaacctttatttatttatatctctcaatcaggagaaacagctgatagccgtgcagtattggttgaaacaaataaattaggccataagtctttaacaattacaaatgtagcaggttcaacgttatctcgtgaagctgatcatacgttattattacacgcaggacctgaaattgctgttgcatcaactaaagcttatacagctcaaattgctgtattatcaattctttctcaagttgtagctaaagcacatggacgcaataacggtattgacttattaagagaattagcaaaagtaacaactgcaattgaaacgattgtagatgatgcaccagtaatggaaaaaattactaaagaattcttagaaacgactagaaatgctttctttattggtcgtgcgatggattacaatgtaagtttagaaggagcattaaaacttaaagaaatttcatatattcaagctgaaggatttgctggtggagagttaaaacacggtactattgctttaattgaagatgatacgccagtcattgcgttagctacgcaagaaaatgtgaatttatcaattcgtggtaatgttaaagaagtagtagcacgtggcgctaaaccttgtattatttcaatggaaggtttagaaaaagatggagacacatatgtgattcctcacgtacacgaattattaacgcctttagtatcagtagtagcgctacaattaatcgcatattatgcagctttacacagaggattagatgttgacaaacctcgtaacttagctaaatcagttacagttgaataattcaaaaagctgggacatggatgacatgtctcagttttttatttgatttgttaaataatcagaatcatcatacaattattttaagtagaggtgatcatttgataaatttaaaacatatctataaaaagaaacacggaaaaacaatcattaatgatttaaattggcatattgaagcgggagataattggattctttatgggttgaatggtgcaggaaaaacaacactattaaatatcatgaattcttatgaaagtgtatctcagggtgaaatagaattgtttgaaatgataccaggtaaaaaaggatattctgcagaaaacgttcgtcaacatattggatttgtttcgcatagtttattagaaaaatttcaagacggtgagaaagtgattgatgtcgtattaagtggcatatttaaatctatcggtctatataaagaatattctgatgaacatactaaagaagcagaaaaattattaaatttagtaggaatgttatcatataaagatcaatatttaggatatctctcaacaggacaaaaacaaaaagtaatgattgctcgcgcgcttatacatcaacctgatgtacttattcttgatgaaccagcatcaggattagactttttggctagataacagttattatatttattagaaaatttaaataagacatacgctcatttgacgatgatttacgtgactcatgtcatagaggaaattattccattatttagtaagatatttttattaaaagagggtagttgttttggtaaaggaataacaaaagatattttaactgattcgatgatgtctaaattttttaataaccaaattgaagttattcaatatagaaatcgatatcatctttatataaaacataattgagtttgcactttggttaaataaatgtcacaattttaagaaagagttagatggagggtatcacgatggcattagaaaatattaaagcaatattcttagatatggatggaacactattgcatgaagataataaagcgactgtaaaaacaaaagaagtaattgatcagttaagagaaaaaaattataaggtatttctagcaacaggacgttcttattctgaaattcatagtctagtaccaaaaggttttaaagtagatggtatgattagttctaatggaacaagaggcgatattgaagatacaattttatttaaacatagtttgacaatagatagtgtaaaaaaaatcgtgcaactagctcaacaacaacacatttattatgaagtttttccttttgaaggagatagaatttcattaattgaagatcaatcatggatggaagatatgattgatagtgaacatccacaaaatgaagtgagtgaaagtgaatggaaatcacgtcgagatgccatgaatggtaaaattaattggagaaaagatattccaaatgacgactattctaaaatttatctattcaacaaaaagttaaataaaattaaaacgtttagagatgaattaatacaaaataaagtgttattaaatattagcgtatctaattcttcaagatttaatgctgagacgatggcttatcaagtggataaaggcactggaattaaagaaatgatagatcatttcgatattaaacaagaagaaacacttgttattggtgatagcgataatgacagagcaatgtttgaatttggaggatacactgtttcaatgaaaaatgcacgtccagaaattcagtctattactgatgatactacacaatatacaaatgaagaggatggcgcggctttatatttagaacaacattttttaaattaaaataaggtaagaaagtaggagaaacctgctttcttaccttttgtgttaaatataatttatttatcgttattcaaatttttttgatgatttaagtcttctttaacatgattttttgtctcattaaaagatgaagggtcgttttttaacgcttcttttttatgatttttttcttttcgtttactttttttcttttcttttacaggtctattcacattctcaccgcgacgtaagaaatattgaacaatacccattagaattacaaaatatagaattaaacgtacaataataataagcgtttgagcaataattaaaatcacttgtgctacattttgggacatatttccggttaatacagttaatattgtaccaagtggttgtgtaatgataataatgagtaggttaattagtaagatagctaaaaagaatttgaaccaagttttacgtccatttttaatgcctttaaagccgtctttaaaatgacctatagcacttaagtcatttttacgtgcaaatgacacagtataattaatcattaatataaagaagaaccaatatacgattgaaagaatgaatcccataatgataattaagataatttgtacagtaagtaaaataccaatagcgtgatcggatgtacttactgactgttgaatagatgtgaataatggtgttaaagctttattaaataaaaagtttaatcctaatgtgattaaatataatacagcataaagaataatagtaattaaagctaaaagaagacttttaacatattttccttttttaaaagcaaaaaacaaatcagaaaattgaacagcttctttttcaatagctttagccataatattaaaagcccccgcaagtaattgataacctgcaagtataaagaataataatcctaagaccaggacgagtattatcataactaatgacgcgcctgctgactgttgaaattgtgctgctagttgcatctgcataaagttttgaacgaagaaagttctagcaatcacaaatgccacaaatgcaataataaaacttactaaactaaatagtattgtttttatgagttgtgacttagcatttttaaatgctaaactatgaaatttaaacaaaataagcactcctttacgttaatataatacacaatatcagaatttgtgatttttttaaattaatatctaacaatattatgttttaagtgttaaaatatgctaatgatttaataatgaaaggagactttatggtgaaatttgcaattttaacagacgttcatggtaattttgatgccttacaaactgttttagatgatattgataatagagaagatatcgatcaaatctttaacttaggtgataatattggaattggtcatgagactaataaagtattagatacgattttcgatcgagatgatatggaaattatatctggtaatcacgatgaagccattatgtcaattgttaatggtacaccgtatccagaagatttaaaaaataaattttatgaacaccatcaatggattgaaagtcgaatggatgaagattactatgatgtattaaatacactaccaagatatttagaaaaaacaatttgtgggaaaaaatgtttatttatacattatgaaattgaaaatcaaagattagaagagggtattgataaacaaccatttgaacctattgtagataatcaaaaagaagaaatagttaaattatttgaagataaggacgcgaattttatagcttttggacataatcatcaattacacttgtatgatgataataacaaaacatatttcaatcctggttcagtaggacttaataatggtaaatatgccgtatatggaatcgttacaattaatgaaaacgagtttagcgttgaaagagtaaaattaccgtatgacaatgaagaatttcttcaaggatttgatgaaaaacatgtaccaggcaaacaatttattttcgatcattttatataagtaaaaaaagtcgagcagaaactaatatgaattctgttcgacttttttacttatattgtaaactgcggagattgtttatgtaatcttaatgatgagtgtgctctttatgtaatccagagcatagtactgaagtatcatgatcatgttgtgctgtttctaattgaatcgtcatatgttgtatatttaagtgaagcaattcatgttctatttttttaagaagtccttcacagtcctgaacagacatagtttcagagactactgcatgacaacttaacgcattcatatcatttgaaatagtccaaacgtgataatcatggacattataaatttcattatgatttgtaattgtactaatgattttatctaaattgacgtcacttggtgtaccttccattaaaatattaagtgacgaacgtgaaataccgattgcacttttcaatataataatggaaactagaatgcttgcgataggatcagcaattgtaaagttaaatacgtatataagaatagatgctataatggcacctaatgaaccaagtaagtctcctaaaacatgaataaaagcaccgcgcatatttaagttatgtgacgtatcaccgcttttaaacatgattattgcaacgataatattcactataagtccaatcacactaataataaacatttcagtggattgcactttaataggattgaaaaatcttctaatcgcttcgatgataatgacgccactaataattaataaagttataccattaaataaggcagctaagacttcaaaacgcttgtaaccgaatgttttagttgaagtagcatttttctctgcataaataaatgcgattaaagcaactcctagtgaaacagtatcgctaaacatatgaagtccatctgataatagcgcaagactattagcgataaatcctcctaaaatttcaacaatcataaataagcctataataataaaagaaattgttaatacctttttgttattggtatggacatgattatgagtatggttatgatggtgtgtgtgattagacatttattattcacctctttgatgatgagcatgttgaatggcttgttttaataaagtagaaacatgttgatcgtctatagaataaatcatggattgtccatgacgtgacgatttaacgaggcctgcttgttttaaactctttaattgatgcgatacatttgattgagttaattttaatgtatgcgtaatatgcccaacactagcttcacctttatataacaattctaaaatacgtaaacggttataatcgcttaacgctttaaatgtctcagttaaacggttaagcatgtattcatctataaatatatctctatctttatttgtattggacatcacatgagacctcctctttaatatattaatatatattcatatattaatatatagtgtccttgtctaagtgtcaatgatatatagtaaataagtttaaaaatgatactaagtggtattaataaactatgaaatgaattgaaggaggaaataagtttatgagtatattagttattggtgctaatggtggcgtaggttctaaattggttaaccaattaaaagaagatcaagttgattttacagccggtgttcgtaaagaagaacaagaaagtgcgttaaaagatcaaggtgttaatgccattttaatagatgtagaaaaagatagtattgatgatttaactgagaaattcaaaggctttgataaagttattttctcagttggttcaggtggtagcacaggtgctgataaaacaatcattgttgatttagatggtgcagtgaaaacgattgaagcaagtaaaaaagcaaatgttaaacattatgtaatggtttctacttacgattcacgtcgtgaagcatttgatgcaagtggagatttaaaaccttatacaattgcaaaacactatgcagataatcatttaagaaattctggactaacttatacaatcgttcatccaggtggtttagaagataaatcaggtactggtgaaattaaagctgacttgtattttgatgaaggaagtacaattccacgcgaagatgtggcttctgtattaaaacacgtagcgacttctgaagataaatttgaaaacaaagaatttcaaattctttcaggagatcaatctattcaagaagcattatctcgttttgagtagttaagttagataattaattacaaatgaaacgttctgtgttagagtaggacagtaagttttaaaacttgctgttctattcttttttattaatatatataatttctattaaattaataatgaaattgatataataaacatatgagtgaaaatttttatttaactatagaagcgaaatagcatttatatagaattagatatctgatatattaaaagcttaaatagatagtaatttaaagataaaatgggtcatcaattgttctaattatacataatcatttaaatacgatatttcactttaaaataaagagagaagcaataaccgtgttttaggaggtgcaatcatgccattatttttaaagcctattttctttgaaaaaatatggggcggtaataagttaaatcaatttaattacgacataccaagtgaacaaactggagaatgctggggtatttctgcacatccgaatggaaaaaatatgattgaaaatggtcagtatgctggtcaaacattagatcaagtatggaatgagcatagagaattatttggagactttccaagtaaagatttccctttattatgtaaaatagtggatgcaagacaccctctatctattcacgttcatcctgacgactcgtatgcatatgaatttgaaaacggtcaatatggtaagtcagaatgttggtatattattgatgcagaagaagatgctgaaattatactcggtacctctgctgattcaaaagaaacatttgagaataagataaaagaagaggcggtgttggatgcagtagaaagaatcaaagttaaaccaggtgagttttattttataccagctggaatgcttcattctataggttctggtgttttagtatatgaaacaatgcaatcatctgatatttcatatagagtatatgattatgaacgtaatcgaactgatggatcatcattagaagttaaaaaagcattagacgtgattcaatttactgcaaatgcacctgctatagtacctgaaactacaattgtagaaaatcataaacgtagccaaattgtatctaatgacttttttacaatggttaaatgggaaataagtggaacgcttaattatatgaagcctcgtgaattttgtcttatttctgtattagaaggtcgtggacaagtgattacagatggtgaaatctttaagctagaaaagggatctaattttattttaacttctgaagatttagatagcgtatttgaaggagagttcactctaattataagttatatttagttaatcaatttaatttataagcagacgtgttggaataatttctatatctagcatgattttcttgtgtgatagctgaatctagaagttttttatcttccgcttcctgttaatcggaaatctaataatgtttaaataatgagatagtatattttaatagtgaaatggaattttgtgaggattcatatgattctatttcacttttttgaatttaaaaagtgatttaataatacgtcaactctattaaaaaaatatgataaaataaaaaaaacgaaatcttatagacgattcatatatttaaatttaagcgatctaaaaatgactaataggtgctaaaattaatattaatatatacatgaataaagatgctaaatttaaaataagtaagaaggagattctagatggcagaagaagtaaattacttttggttaaattgtggatatacaagatggaaccataatgaaccattagttggacaaacaactttatttgagtctggagcacagttcaatcctactcagggttttcgagcgttcaaaaaagctaaaattggcgatcaagtgattttttatcaagtacaaacagatactggattattaggaattggggaaattattagtgttcaaacaggagcacaaaataaaattagagttgaatttaaatttaatgaagagttaaagcctttaactactgactatttaaaacgtagtgaagtgctagattatcgaatgaataatatgcgtgaaacgttaataaatcaactcacaaaagaggagtttcaattaatcgttgagttaggaaaaggtaacattcaattacctcgatatttctttttatctgaaactgaaaaatttgaacctgatactcattatacgatttttacacatacttataatggaattaaacggaatggttatcatttttataaccaattagaagtaggggataatttaatattttatgataagaatagtaatcaatcggtcgtaggaattggtgaagtatctcgtcatattcatgaaaaacctccaattcctggtcgtactaatagtactgcaattgagatttattatgaaaagaatatcactcctgttacattaggagcactaaataaacatcctaaattaaagaacttatactttttacaagaaaatgctaagcaagcaatagcaagtatgagtcaagcacaatacgatgctattatagacatgagtgaaaatgatgggattagaacaccatttgagactattaaaaaaccaggattcaatacggatcatgatgagaccattaaaccttttattttactcgttgtagataaacgtgaagaaggtttgaaagcagccaataatcttttacaaaaaacgaatgctaatccagttattactagtggtcaccctgactttagtgaagatatgttatatggcaaatatctacctaatgagacaggtgccttatattatagagaaggttttattacacaacttatgcctaaaaatgacaaaagttacttagtgattgataactttaatagacttgatccagatatatttcaaacttatattaatgttttagaagggtacgaagttacattacctagatataataaagacggtaacatgattacttggtctcgtgaaaaagattctttttatcattttaatcctaattggcatattattggcgtaacatacgaaaagttagaagatataaaaaataaatattcacaacaatttttaaaatatacacgtattgtaaaagtgaaccatgatgcataatgtcaaacaagttagataaaaacagcataatgtataattagttaaagtggatatagaatttgaaataaattctatatccactttttctgtgtttaatgagtccttgtaaaaggaatatattaaataggttaaaaaggaaggtgacggaacatgccaatcgtttattacgatggaaattgtgtgtattgttataattattgtatttggctaatacaacatggtttacctaaaaattatgagtttgcgactttaaaaggagaggcgggacaacatttatttaaacaacatcccgaaactaaaaataaaaatagtgtgatactacaagaaggagatcgtttatattacgagactactgcagtagcaaaattaatcacaacattaagtagtaaaaaatggttaggcatactacttagagtaatgccattaccaataagaaatttaggttatcgactgtttgctaataatagagataaaatgtggaaaacacattggcataaaccaaacgcatatgaaaaatcattctttattgatgatgatagacaataaatgagaaaactattttttaattgataatatctatatattttgattatatattataaagcttttgataatgattctatatatttattcataagtattagtgttttttaattgcgtgtgtaaaatgactttacagattataattattataatataattatgattgtaaaagagagacttgactgtataaaagtacaaaaaaggagagattcgatgactcaacaagatgtagtaaaagaattaaatcaacaagtagcaaactggacagtagcatatacaaaattacacaacttccattggtatgttaaaggtcctaatttcttctcattacatgaaaaatttgaagaattatacaatgaagctagtcaatatgtagacgatttagcagaacgtattttagcaattggaggtaacccagtagcaacattaaaagaaagtttagaactttcaattgtaaaagaagcagaaacacattacactgctgaagaaatggttaaagctttctctgaagatttaactcaaatttctaaacaacttggaaaagcaattgaagttgcaggagaagcaggagacgatgtttcagaagatatgtttattggcatgcaaacatcagtagataaacataattggatgtttaaatcttatttagtttaaatattctattttaaaaagagccattgtggacgataaaacgtctacaatggctctttaacttttaatagtaacattgataagtgattattcagcgatttctaaagcaatttccatcatttgagtaaatgatgtttgacgttcttcagctgatgtagcttcatctcttaagatatgatcacttacagtaaaaatacctaatgcttttttaccagcatgaattgcatttaaatataagccagctgattccatttcaatacctaagatacccatgttcttccaactatcgttaaaatgtttatcggcattataaaacgtatctgatgataaaatatttccaacatgtgtaactgctccgatatcatcagcaacttgtttagctttagtaattaactcaaaatctgcaattggagcaaagtgaccaggaatattaaattgatctacataatttgaattagttgaagcagcttgagcaataatgacatcatataaattcacattctcttgtaatgcaccacatgaaccaattcgaataattgtatcaacatcaaagaaattataaagctcatacgaataaattccaatacttggaatacccatacctgaacccattactgagatttctttacctttatatgtgccagtgtatccaaacatattacgtacttcattaaattgctcaacattttctaaaaagttatcagcaatatattttgcacgtaatggatccccaggcattaatactgttttagcaattttagttccattaggttgaatatgaggtgtaccgtttgtcatgaatatcttctccttaacatttttattcaaaataaagataacatttgtttaaaatttttgcgaatttttgtactatataaatgagagaaacatataaattatgttaatacagttggctttcgagcaatacattggaggaaatttttatggaatattcaaaatatattgatcatacacttttaaaaccggaatcaacacgtcaacagattgataaaattatttctgaagctaaggcgtatcattttaaatcgatttgcgttaatccaacccacgttaagtatgcttctgaacagcttgtgaattctgatgtgcttgtatgtacagtgattgggttcccacttggagctacaacaaccgctacaaagatttttgaaacagaagatgcgattaaaaatggcgcgtcagaaattgatatggttatcaatataggcgcacttaaagatggaagatatgaagacgttcaaaaagatatcgaaggcgtagttggcgcagctaatggaaaaatagtgaaagttattattgaaactgttcttttaacagacgatgaaaaagtgaaagcaagtgaactagcaaaagctgctggtgcagatttcgttaaaacatcaactggctttgctgggggaggcgctacaccagaagatgtgaaattaatgaaagacactgtgggagacgaattagaggttaaagcttcaggtggcgtacgtaatttagaagatttcaataaaatgattgacgcaggcgctacacgtataggtgcgagtgctggtgtccaaattattcaaggtttagagtcagattctgattattaatcatgcagttgatgtaacagcatacagatacaacagcttattttgagaggagttcagaatgatgagaatgatagatattattgaaaagaaacgcgatggaaaatcattatctaaagaggaaattgaattctttatcaaaggctacacggaaggagatatcccagattatcaagcctcaagtttagctatggcgattttcttccaagatatgaatgaagaagaacgtgcagctttaactatggcaatggttaattcaggtgatgttattgatttatcaaaagtcaatggtattaaagtagataaacactcaactggtggcgttggagatacgacgacattagtgttggcaccattagtagctgcagtgggagtgccagttgccaaaatgagtggccgtggtttaggacatacgggtggtacgattgataaattagaatctattgatgggtttcatgttgaaatctctgaagcggacttcattaaacttgttaatgaagatcaagttgcagtgattggacaaacaggcaatttaacacctgcagataagaaactatacgcattaagagatgttacaggaacagttaactctattcctttaatcgcatcatctatcatgagtaagaaaattgccgcgggtgctgatgcaatcgtcctagatgttaaaactggaaatggtgcattcatgaaaacattagaagatgccgaggctttagcacatgctatggttagcataggaaataatgttggtagaaatacaatggctattatttcagatatgagccaaccacttggtcgtgcgattgggaatgctttagaattaaaagaagcgattgatacattaaatggtcaaggacctgaagatttaactgaactagtattaacgcttggttcacaaatggtcgtacttgctgaaagagcaagtacacttgaagaggcgcgtcaattgctcaatgaagccattgaaaatggctcagcattagataaattcaaaacatttttagaaaatcaaggtggcgatgcttcagttgtcgattcaccggagttattaccgactgccgaatatcaaattgattataaagcaaaatcaagtggtgtagtttcagagcttattgctaatgaaattggcgttgcttcaatgatgttaggtgcgggaagacaaacgaaagaagatgacatagatttaagtgttggcattgtgttgaataagaaagtaggagacaacgtcaatgaaggagagtctttattaacgattcacagtaatcgtgaaaatgttgatgatttaattaagaaacttgacgaaagtatcgaaattaaagcgcaagcaaaaacaccaacattaattcataaaataattacagagtaggagtgttaaatatgacgacaccatttaaaagagtacatttaattgtcatggattcagtaggtattggtgaagcacctgatgctgcagcttttaatgatgaaggttcacacacattaaaacacacgttagaaggttttaaccaatcattacctaatttagaaaaattaggattaggtaatattgaagatttgccagtagtcaataaagttgaacaaccaggtgctttttatactaaattaagtgaagcttctgttggaaaagatacgatgacaggacattgggaaattatgggactaaatatcatgcaaccatttaaagtttatccaaatggatttcctgacgaattaattcaagagattgaagaaatgacaggtcgaaaagttgtagcaaataaacctgcttcaggtactgcaattattgatgaattaggcgaacatcaaatgaaaacaggggatttaattgtttatactagtgcagacccagtacttcaaattgctgcacatgaagatattatcccacttgaagaattgtatgatatttgcgaaaaggttcgtgaattaactaaggatcctaagtacttaattggccgtgttattgcacgtccatatgttggtgaaccaggaaactttactcgtacatctaatcgtcatgattatgctttaaaaccatttggtaaaactgttatgaatacattaaaagatagtgattatgatgttattgctattggtaaaatcaatgacatctatgatggcgaaggtgtaactgaagccattcgtacaaaaaataatatggatggaatggataagttaatagaagttgtcaaaaaagactttaatggattaagtttcttaaatcttgttgattttgatgctttatatggtcatcgtcgtgataaagaaggttatgcacaagccattaaagattttgacgaacgcttaccagaattaattgataatttacaagaagatgatttagtgattattactgctgatcatggtaatgatccaattgcagagggaacagatcatactagagaatatattccagtgcttatgtttagccctaaaatagatgcataccatgaattatcaggagatacaacatttagttctattggtgcaacaattgcagataatttcaatgttgaattgccaaaatacggaaaaagttatttaaaagaaatgggagttgaataattatgaaaataatgagatatttgttaggtttagcatttggaacagcaggaatactacattttacaaaggaacgtcaatttagatcgattgtaccggagtatttaccattacgaaaaacagcagttttagtgacaggcgtatttgaaatgttctttggagttatgttattagctaaaagacctgcggattggttgaaaaaaggtattaatgcatttttacttgcggtttttccaggaaacatttacatggcaagaaagcaattaccattaggaaataaatctgttcctaagtgggcattatacttaagattaccacttcaattcattttaatagctatcgtaaaaaaattataataaaacttaaataaataatgaggctgggacataattcctaacaaaatagccagtaaatgagtttattataaattcatttactggcttctttatttacaatactacgtattgttggctcgctttcttaggggacagcttcagcctgtgtgaatcaacatcaacaagcgtgagtgattcaacaagtgcaagcacatcattaagtggatcaacatcaacaagcgtgagtgattcaacaagtgcaagcacgtcattaagtggatcaacatcaacaagtgtgaatgactcaacaagtgcaagcacatcattaagtgagtcagcatcaacaagtgtgagcgattcaacaagcgcatctgaaatgcaacattcaatgcatcatgcacatagtcattctcaacttcctaaacaccatgaagatttacctgaaactggtgaagaaaattcaaattcttcaatacttgtttcagctgttgcagcaatgttggctggtttaggtatgattagaagatctcgtaaaaataaaaaagatagtgatagacaaagacgttaataagtaaaaagtaagagaactataagagcctaatgacttctttctctcttacaattgaaaaaattaatagttgtttataacgaagggtttaaatgtctattaatatgagctaggcgtcttttctaaaaaatagaggctaaagcataatatttggtaaatagttttaatttaaataccaaaatattttatgtctttagcctttttgatataattaaacaaatgttattttaaaaatttaggtggaattatgttcaaggaacaagaatataaagtgttatataaaagaattatttttacgtgttttattttagtcatttatatttttggaagtcatatttcaatcgttagttctaattcttttcatagtggcaatgatagcttttttaaacttgctgtatctaacgttggaggagatcttacaaatttaaatattttttcattaggtctaggtccttggttaacatcgttaattctaattatgttattgagttatagaaatatagataaaataacgaaacaaacacgtgcagaaaaacattataaagagagaatattaacgttactatttgcaggttttcaaagttattatgtaattaacacatatataaataataattttattaaagataataatataatattactcatgctgactttaattacaggtgccatgctattagtttggttagctgaccagaatatcacttatggcatcgctggacctatgccaattgtacttataagcttaattaaatcactatttaataatcagcattttgaaagcatacacatcaatcctttactaattattttaaccattatagctttaataattgccttattattattgttatttattgaattaacagagtatagacttagttatagagatattatgaataatgcaaataaaaaatcgccaacatatttagcttggaaattaaatccagcgggtagtatttcaattatgatgagcttatctgtattcgtacttttaaataatttaatccatcttattggagcaatttttggaaagcatttgaatttgtatttcttaagtttttctaatccaataggtataacaagttactttgttattcaaattatattgaactatgtcttgtctcgctttttaattaatacgaaaagaaaagctgatgaatttttaaaaaatggaaattactttgacactatttatccaggcaaggatactgaacgttttttaaatcgtaaagctcgaaaagtatgttggattggagcaattatcgtagcattgattcttgcttttccaatgtatttgacattacttgcacctggtttttctaaagaaatatatttttcagcacaacttattatattggtatacatcagtattaatataggagaaacaatacgtacatatttatattttgaccgttataaagaaattttaaataaatattggtaggagattgttatgaaacagtttatacctgcatggtatgactctaaaaattggtggaatagcactacacaaccgttttatataaaaagaaaagtcacagaatttgacgatatgattagtttaatttctatgcatcaaaaaaataattcacagttcaataccattattttaaattatcaaccgatgctaagattatttcttcatagacacggactatatgaaatgtcttattggtcactttttgatgatattcaaggggtagcccaaatgtcgccacaagcgatagactatagagatttagaatggccagaagataccgagtttatctatacgccatttcaagttatagcaattaccagtgaaactacttattctaaaatgaattttagccaagaaggttatctcttcgaaatagaaacatataaagagaagtcattgcaagttaaatatttatttgatgatagaggattcatttcttcaattgaaaagtttcaaaataatggacaacttagttataaagaatatctagatattaatggtcatactattatgatacaaagtcttataacacaaaaagttgaaatttctcgtgatttttatagtcaatttgaaaaaatagagtattcgagtattgaagagattatttatgaaaaattaagtcaatattattttaaatatatagaacatcatgacaacgtcatcgtcgcagctgatcaacatcataacgacatgattaacaagatatttgatttaaaaaatctttgtttttcagtatttactcaacgtaatcgaacattagaggaatcaatattacaatctattattcaggcacaatattgtattgtagatacattagaaaatgaacaacttattaaagattttgtgaaaaagcatgatatcgctaaccactttagtttaatgcgtattacacccttcgatgtacaaacgctacctaatatgagtagtcaactctatgaaaccaatattggagtttggatagatagtttaaatgaagtaagactcaaagaattaatagatatacttatacaatatagtgtagaaagagaaaatatcagattgcatttattaactagaaaaaatgatactgatattccagaatggcttacttataaaattaaaaatactaacgaacaattaaataaaaatgaggaacagttatctttagaagtacgagatattttagaaacagaagttgaagaaattgaatatattaaacttatttttgtaccttttgaggagcatttattgaaagaaatgtctcacttacgagtaatgatagacttaggaaatgagcctgacttatacttgcaaatttcaagtatcagtgtaggtattccgcaaataaatcaacttaaaacgaattatgttgaccataaactaaacggtttaattattaatgatacgtctgaattgattatggctctagatttctatctattaaatcttaaaaattggaattattcatttgcacactctataaaattaagtgaagaattcagttcttctaagattattacacagttaaaccatttgattgaaggtgaaaataatgggacgtaaatttagagtactacaaataggaggacatgatttgggttcactatttaaggaaaaagaagatgtcgaatgggattatcttgacgatgcagtatttcattttgaaagtggatatattgatgcagttcaagagattataaaggtctatggtgaattcaatcttgtctttgtgcaaagtccatattcacaatcactcatgaaactattacatttagtgagtgtcccgcataatacagtcatagattttcatgtatggtcagatctctttgaaaatgattctttagtaagatctaaattaataaaacctttatattatgaaaatgaagaaatgttacaccataaattattttcagtcactttcgtgaaacaatatggtgatagagtttctcctataaaagtaatggtcaatcctagttttaaaggagaatatcattatcaaggaaataaggcactcgtacttgagggagattttggaatggagtttacaccattacttacatggacacaaaatcttgttaatgatgcaaatatagttaacgaaatttggcctgaatatacgatagaaggagatattgatcttgaatatacgctacgaatatttccatttggatcaacggatataccagaaatgacctttcactatcaccaaaaagacttattgaaccccattcaattaccacgattatcttatcaagctaatataagtgtgtcacttaaagcaaaaggaaaaggtaagcttagtgttggagcagtacataagagatggtcacgtcttgaaatgggtcaatttattatggggggacaacgattttcagatgattctagggacgaatttatgtattactttaatccgggtgatatgaaaccaccacttaatgtttattttagtgggtatcgaccagccgaaggattcgaaggtttttatatgatgaataaaatgaatgccccatttatcttaattagtgatccaaggctagaaggtggcgcattttatttaggatcagaggagtatgaacaaaaaatcattaaggtaatcaaagaagctttaggatttttaaaatttaaagacaatgatttaatattatctggattatctatggggtcatttggtgcactttattatgctactgtgcttgaaccagctgcagttattataggtaaaccacttataaatattggtacgattgcgaataatatgaaactacttcgccctaatgaatttggcactgctaatgatgtgttattagcaaatgagggggggatttcaaaacaagatattgctaacatggatcaacgtttttggaataaattagaacatagtcatctttcagataccatatttgcaattgcatacatgaagcatgatgattatgatgccatggcatttcacaatatatcacctatattaagcaaacaacgtgcacatgtgatgagtcgtggtgtaccaggtcgtcataatgatgactcaccaacaataacaaactggtttattaacttttataatatgattttagaagatagttttgggagagattcacatgcaagcactaaataattatcgtattgaatggcgctatatccatccttcaacatttatgtatggaacgatattacagtttaaaaaagaaggtacgttgtttaaaaacccgcttatgccttcaggaacagtgattcatgcttggcatatgctcacacgctttgatatagacaaggcagtaccctctcttccaattttaagaaaagggtatcattatgaaattaaactaaatttcgacgttcaacctccacgtgctgcatacgttaaagtcacattttatcgaaaaaatgattctgaattgtcgtatttaattattgaaaaggaagatgaaatcacagaatttaaatttcctcaagaagcctatgcttataaaattgaacttatcaattctggattaaattttcttttatttcataatatcattattaatgagtcagaaaataaacatcctaaacatgataccactacagataaaattgaaataataaataaagttattcatcagaccaacactactaatggaggtatatcatatggcaaatcgattgaatgatatgattaatcgtatgcgcttaaaacgaatagataaactactatctgaagtcaatcgctatagtcaattatttgccacatattctgatgaagcgcttcaagccaaaactatagagtttaaacaacgattaaaagatccaaaaatatctctaaatcaattattaccagaagcctatgctacgatacgtgaggcatctaaacgagtgttacatatgtatccaaaagacgtacaagtcatgggcgctatagtgatgcatcaaggaaatatcgctgaaatgcaaacaggtgaaggtaaaacattaactgcaacgatgcctttatatttaaatgcattaagcgggaaaacagcttatcttattacgacaaatgattatttagcgaatcgagatttacaagaaatgaagccattatacgaatggctaggtttaacagcatccctaggttttgtagatatacctgattatgaatatgatgagggagaaaaaaagaaattatataatcacgatattgtctatacgacgaatgggcgtttaggattcgattatttatttgataatcttgctgaccatattaatgcaaaatatttgccagaacttaattttgcaatcatcgatgagattgactctatcatattagatgcggcgcaaacacctcttgttatctcaggtgcaccacgtgttcaatcaaatttatttcatattgttaaattatttattgagacattagaagaagatgagcattttaaagtaaatttaaataagaaagaagtttggctcactaaagaaggaattgaaaaagcaaatcattattttaaagtcgacaatatgtataagattaaatatttcgatttagtccgtgttattaacttatcattacgtgcaaagtatctttttcaagataacttagactattttatttataacggagaagtggtattaatcgatcgtattactggacggatgttgccaggtactaagcttcaatccggactacatcaagcacttgaagcaaaagaaaatgtcgaattatcgcaagattttagtgttatggcaacaattactttccaaaatttatttaagctatttaataaattttcaggtatgacaggaactggaaaacttggagaaaaagaattttttgaattatattcaaaaatagtgattcaaatcccaacccatcatccaattatacgcgaagacaaagaagatagagtttatgtgaaatctgatgataaaaacaaagcaatacttgaacagataattcatattcatcaaacgaagcaacccgtattacttattacgcgcaccgctgaagctgctgaatttttttctgcccaattatttgaacaaaatatcccgaataatttattaattgctcaaaatgtagcaaaagaagcacaaatgattgcagaagcgggacagcaagaagctgtcaccgtgtctacaagtatggcaggaagaggaacagacatcaaacttggtaacggggtatacgaactaggtggactagcagttattattaatgaacatatggaaaatagtagagtggatcgacaactccgtggccgtgctggaagacaaggagatcctggacagtctcaaatatatgtttcgttagatgattatattgtaaaacgatggagtaataccaaatgggctaataatgataaaatcaaaaaaatagattaccaaaaattacaatatagtccattttttagaaataaagtgagaaatattgtgaaaaaagcacaacatgtgtctgaagaaacagcgatggttaatcgagaaatggcaaatgagtttgagaaaagtataggtatccaacgtgaacatatatataaagaacgtgatcgtattttggcaatagatgattttaaagaatttgattttgaacaattagcacgtgatgtttttgaatatgacattaaaacaaagtatatagtcactgaaaacgatgtaattcattatatttacaatcatctaagttttaattttaaagatgaaacgatgactcaatatcttgaatctagagaaagtattatcaatttccttcttcagcaatttaataaacaattggaaaagaatcttaatactgttaatgatgcgtatttaaaattaagatttttacaaaaagcaatccttaaagctattgatgtcgaatggatcaatcaagtagatcaattacaacaattaaaagcaagtgtgaataatcgtcaaaacggccaacgtaatgcgatttttgaatatcatagagtagcattagaaacatatgaacatatgacaatgaatattaaaagagaaatgattcgaaacttatgtctaagcattttaacatttgataaaaagcaagatttagtgatacatttcccataaagttgaggtgttgtttagtgaccatttataatataaattttggaattggctgggcaagtagtggagtagaatatgcacaagcttatcgcgccaaattattaagacaaattaatcaatcagctaaatttatttttttagattttatttcatctgaaaatattcaaacattaacccacaatattggctttaaagatgatgaggttatatggttatatcaatattttagtgatattaagatagcacccacgacatatacgattgaccaactgattcaagatttaggtaatcctgttactgcacgtattcaaacaggaaaagtgttacgtttatatattggtaataatcaatcttatgtaagttgctatttaaaagaggaagataaagaagttgtagatcgtgctgagtttgttgtgaatggaatgctgatacgaaaagattattatagttatgttcgtacgttttcagagtattatgcaccaaaggataatcgtgccaaagtgtatatgagacagttttataatgaagatggttctgtggtatatcgagagtatattgatggaaattcgagtatatatgtgtttgatgatgctagattatacagtaaacaacagtttgtagcttatttcatgcaacagttacatttaacttcggatgatatagtcattattgatcgttctacaaaagtagggcaagctattcttgaaaataaaggtcctagtaaagtaggaattgtagttcacgctgaacattatagtgaaaattcaacagatgatactcatattttatggaataatttctatgaatatgtattttctaaagcaccttttattgatttttatattacggccacagatttacaaaataaaatcttatctgagcaatttaaaaaatacacatcatatcaaccacgaatacgcacgattccagtaggcagtttgcaacagcttaattatcctaaggaacatcgtcaaccttactcgatgttaactgcctcaagactggctagtgaaaaacatgtagactggattgttaaagcagcaattaaagctaaaaaagaagtacctaaattaaggtttgatatatatgggcatggtggcgaaaaatcaaatattgaaaatattattaaagaaaatcatgcagaagattatattcaattaaaaggacatgtcaacttagatgatatttatatgaattatgaattatttgtttctgcttctacaagtgaagggtttgggcttactttaatggaagcagtaggttctggtcttggtatgataggttttgaagtcaattacggcaatcctacatttattgaagagggtaagaatggatatctcattccaatcgataaagacaatcaaaatatagaagatattactgatagcatggcaaaaaaaatcattcaatatttcaataaaggattaacacgtcctcatgacatgtcttataaaattgcaaaaccttatgaaacaacaaatatcacgcaaaaatggcaaaatttaattaatgaggtgctacaatgattaatttatttgaaacatttaatgatgcatcacaaaaattacaacaatctctgtatcttgcagattatcgacatccaacaattgtgatggatgacaatggttttttacctgatgatgtcatatcaccttataaattttttgctaattataaacaatttaaagatgatacaccaactttttttaatgaggtgaatattcctcctttatgggaaattgcgggaaatcaaaatattgcagaaattattgataatggcaaagtgagaggacgcatattttaccgtgaacattttaaaaatagaattgtaaattttgttgaatggtttgatgaaaaagatcgtttacgttcagtcaatcattacactaaagagggagtcaaatttgcacaaacggtatatgatttagaaaaagaacccatcttaaaaacatatgtgaatcgtgaaggtaaagaagtcatatatgaaaactttgttaccaaagacattgtgctggattggaagggtcaatcttatttctttgcatccaaacatgacttcattattttctttttgaatcaattagatatagatatttctaagatcattattaattctcttgcaaccccattttttgtactttattattctgattttattaaacaggccgtactattttggcaagaaaatagtgagagtcatgtcccaggaaatatgaaactcctattagataaagagcaatgtcagacatcggttattattccagataaacaagaatatgaacgtattataagccatatcgaagcaaattatatagataatattcaatcagcgggatatttatatgattatcaaaggaataataaatatacaaaacgcatactgaatttaacaaattctgatgatattccatatattgaagaattgataaaattacatccagagtttgaatttcatatcggcgcgataactgaaatgtcttctaaattattaaatttagagcagtattcaaatgtagtgctttatccaacagttacgccaaaaacagttgatcgtttgtttaaaaaatgtgacatttatttagatgttaatcatggtggcgaaattttaaatgcacttgaaagggctatgttaaacaatcaactgatacttggttataaagaaacaatacatcgaccttcttttgtggcagatgacaatataatttcaatgcaacactatcatgacttaagtaatatcttaaatattattgtgaaaaataaagaacaatttaaaaaacgacttaaacaacaaaagttacacaataatcaaattgataaacgacagtttaaaaagactttaaaacaaatattagattcaatttaagtatttagagtttaggggtgatacattggaaacagtatatctagctggagggtgtttgtggggtgtacaagcatttattaaaacattgccaggcgttatagctactgaagcaggacgtgcgaatggaacgacgcagcgacttgatgatgaatatgatggctatgtagaatgcgttaaaacagtttttaatcctgacatcacttcaattcatgatttaatgcattatttatttgaaatcatagacccatacagtctgaataagcaaggcgtagataaaggacctaaatatcgtacaggtgtttatagtgaaaatgagagccatcttaaagaagcacaacaattcattcaacaacgttcagatagagataaaatcgttgtagaagtacttcctttagaaagttatgttaaaagtgcagatgaacatcaagatagattagataaacatcctgaagacatctcgttatgtcatatctctaaaagtatattaaataaatacaattaaaaagaatgggacagcattcatatcgtattcgttgtcccatgtgcgctttattatttcttagaaaatgtatcgataagactaagtgcagctaaacctaatagatctaaagcatgttgtgcgccaaccttaccatgacctgcctcaaggcgtttatatactgcaacgcttaatacactaaacgtgacaagtgatcctaagcgagagatatttttatgcaagacacttgtggcaaacaaacccgatgcaatgaactcaatcacacctgctaatttcattgcacgttccgataatttaaaatcttgtgtaaatagttgtttagtataagggttaccggtaagtttacgttttgaagcggcatacaaatctttagcgagttttaaattggtagcataacgtaatatcattatctaaacgctcctttatattatattttttagttaaactaagtataaaagtcgcgttaaaaaaagttaaataaaaacgttcagcataaatgtgtaatgcattcacgctgaacgtttttatttatatagttattgaattagtttttaccgaatgtatcagcaaaacttaaagcagctaagccaagtaaatctaaagcgtgttgtgcgccttctttaccgtgaccagcttcaaagtgtttgtaagctgcaacgcctaatacaccaaatgttgcaatagaacctaaacgagaaatatttttgtttaagaaacttacagcaaataatgcagcagcagtagcttctactgtgcctgctaatttaactgatttttctggtaaaccaaatacatttttaaatgtatcaatcatttctttgctaccttgtaattttggttttgatgaatcatataattcttttgcaagttttaaatttgcagcataacgtaatatcattaataagtaccccttttttagttaaattattttattataaaataagtataatttttatactagaaattatatgattattggtaagtaaagtcaataaaaagcgttagataattacctttttataagaaagtgttaatcagtacactttagaaactatattgaacgtgtcataataatactgttgtgacaaaatctatgaaaggagttatattatggaaacatcgatgaattataatcgaatgactacaattttctttatttcgggtattattgttatggcaagtttatacactgctttaccccttacttctgtattcgcaaaagattttggcatttcaaatgctgttgcctctctaaatggtgtgatcttttcaattacgtattcactaagttgtctattttatggtacaatttctgaaaaatttggacgtattcgtacgattttatttggacttattggactcgtcatcatatgtttacttataggcttcattcattcgttcacactacttattattcttcgtgcaattcaaggtatatgcgcggcagctttttcgcctgtatctattacttatgtcactgaaacgtattccccagtaaaacgtgtgactgcgattagttttattagtacaagttttatgttatctggtgtcattggccaaaacttgagtgaaattgtagtacgttatactaattggcatatggtttattttatattaacgttactttacatttttatagcagtacttatatataaatatattccagaaagttcagtgaaaaatcctcaactcaaactagtaggtttctttacaaactttaaagattttaaagataataaaatagtcatattatgttatcttatttctttatctttacttaccatgtttattagtatgtatgcaatctttaatcattatattacttctgatattgtgggtggctcggaagcaacagccattaatgctaaactctttggtattattgggatgttactttcattattagcaggacgtatgagtgatcgtacaggagttaaacatgttatcgtaggctcattaattgtcagtatcgtttctcttattttaatgggcttcactacaaatgttattttattagtgatatggagtgtattatttgtaggaggtattgcgtttgcaattccatctacgatttcaaaagtaggtatggttgtcaatcgaaatcaaggtttcttcttatctgttaatacctttattctgtttttaggaacagccattgcgccattattgatgattcttattcaaccattatctaatttcacattacaatttataatgattgcgaccatcggcatcatcgctcttatagtcgctttacttttaccaggtagaaaaaatgaaatacgataatatatatgatatataaaagaatgaccaatgaaaaaatacagggagtgtgacaacactcatttaggatctattgacatactccctataacttatgtataaacttaagctacgaaatatccgatcagacaaattgcaccaatgagtacaaataaaacgccaggtaaatatattttttctctaagatcaatatcttgtctatatgcgacaaagctactaatagagatgagtatgataccaactactagtaaaataatagaaagtataagcatcaactcagcctccttcatatcaaaattaatgaaaacggtgttctcttaattttattatattaggaataaacaagtttttatagcgatttattaatataatgtaaaaatgttatcatttttatagttatttattaataaaatttataagaaatttacatttaataaaataattaaaaggagtagaaaatgaattctaaaagaattgttttctactcctttggttatataaatgatctttgcatatcattgacgtctaaatactttcattttttaaagaatagattaatgtcatgaagttttgaataagagaagtgagacgatgatctgcccggtaaacgatagagatatagcttgaaggtgggccttcttttaatgacttaccaataatattaggatgatggaataaggtgctttggcttacaagacttagataattagaatctttaataattgttaatatactactaatactatttgattccatatgaacatttaaatcaataaaattgttttttcgccaatcatcaatactttctcgtgttgaaccactactatgaataatgaaacgatacgcatttaaatcttctaatgaaatatctgtttttgaagccaaaggatgtcttttatccattgcgataacaagtggattttcttgaagacgtttcactttcaattctttttcattgaatcctttttctgaaataacaccgatatcaatctctctatcttttattttatttagtattataggagcagtatctacaattaaattaatatcaatatttggataatcgtgcatatatttttttaaagtgctaggaagaatactataaataggtgcatggcttgctccaacgcgtaaagttccacgtttagattgtttgaattcttcaatcatatgtgttgtttcatcaattaaatttagcattttattagaattacgataaagtaagtctccagcatcggttaaattgaaacatttcccttttttaaaatataaaggtattccaagttcgttatttaaattttttagatgaaatgttacagttggttgcgttatccccagtttttcagcaacagcattttcattctgcaattcaacaaaatttttaaaaatcagcatttgttttgtattcataaattaaatccccaaaatatataaattttttctattctattatttatattaaagaaagaattttgagattacgttaataaattgtttaaagttagttaatgttgatacagtataatggactatacagtattgtcagtagagaattgaatcagaattctgttacgctcttatgtattaaattgaaaattaagggtaataacaatgttgcgtaacaagtcttacaacataaagaatttacatttaaggagagatttacatgtcagaaaggctacttgtgatttctgatattcatggacatcgaaaagcccttgccacacttttaaaacgagcaaaatataatcccaaaaaagatcagctcgtacttatgggggattatgtcaataatggaccggattcatttggaacattaaaattagttaaaaggttaaaacgacgtggtgcgattgctttagcaggtaaccatgaaatgcgctggttaaatagtaaaaataaaaagattaagcgttggcatgcgttcttacgtgaattatctgctgttgaagtgattggtaattatatttttgcacatgcaggaatagataccaataaacctttgaataagcagattaaagaatatactactgggcattattcacattcgcttaatcgtcagattcctaaaaataaatatctagttcatggccatgtaccgaattatcgctatggattaaaaaaagacgacatttataaaaataaaaatgaactatctatagatacaggcgcaggacataataagtttttatcgctgattgatttaacaggtcaatatcagtattcagtagaggtaacgaatattcgaaaaatgaatataaaacgcttaaaaatataatagttaatggtgtttaatctttgatgaaaataaataaataaaaatataataagacattcaagttttatgtaaaatgttatataatgaaatggaatatcactaaaaaagggtggcattaatgaataaaaatacgcaaaacgaaaatcgtaaaatgtcaaagttaagttcgtatttaaaagtgtcatgttcagctttaatattaagtagttcacttgtaggttacgggtttactaaagatgcatttgcagcaacacaagatgcagaaacagcaacttctgaaacttcaacacatgttcaaaaagatttacaagatgcaattaataaagcgaaaaaagacattaagcaactaaaacatttaagtgcagttgagttaaaaagttataaagaagatattgaaagtgctaaaaatcagactgaaattaaaaatataatcaaagaagcgaaaaaagaaaataaagcaacagcacaagaaaacacaacggacgtttcaaacaaggataatagtactgaatcatctagcactcaagatgcgtcaacagaagaaaaagctacaacaagtcacgacacttctgctgatgatacatctaatatatcaaatgatttagataacatcgtatcagatttagatgctctatctaataaagttgatagcggtcaacaaaaagatgcaacaacatcaaatgaatcttcgtcttctgaatcaaatacttctgaaaacacaactgatgaagtaacgaaagaggaatccactacggaagaatcatcaaaagaagcaccaacaactgaggatccttcaaatcaaccaacctcttctaaatcagaaacttctattgttgataaattagatagtattaaaaatgatatcgatagtgctaaaaaagacatggaaagttcaaaagaaaacaattcaaaccaattaccaagtgatgacaataatactgaagaggcgacaactgaatcatctagcactcaagaagcgccaacaacagaagacacaacacattctaattcaaaccatcatgtattagatgaattagctaaattaaacaatacgcataaagatcaagacttagatacagatgtacgacatcatcaatttgataaagtgaatcaccaattatcagaaactgaaaaaattaatcaagctattgctaaaattgaaaatagtaaagatgatgccagtcatttatatatcaatcgtaaattagatcaattatctgatttacgtgataaaattcaaaatcaagctgatttagcgaaaaaagataaacaagctattgataatgacattgaaactgtacgtaaaaatatagagaataaccgtgatattattcttaatcgtttgcaacaagcgtctgacaaacaacatgcagctgaagatatattaaacagcgtgtttagtaaaaatgaagcacaacacatcttgaaaaatattaaaacaaaagggcagtctgataaacaaattgcagatcagattatgaaacaaattgatggattaacttcaacaacgagtgatgacattttaaaatctatgttagaacaagctactaataaagaggatttattaaaaacaattttatctacacgtttagggcaaaatgaagcggctactattgcgaaacgattagccaatgaccatttaacaaattcacaaattgttgatcgcttaaaacaagcatttaatcaacatggtcttgtgtctagtgatgatattttaaatgatattttagataaaacgtctaatcgtaaacaagctattgaaacaatgttagcaacaaaattaaaccaagcaaaagcgaaggttttagctgatattatttcaagagtacaatctgacaaagcgaatgctttggatttagtgaaaagtacaattaatggtaaagcaaatgacttattacaacttcaaaatagcttaggtcaagccaaaaatagattaaattatattcttgatccaattgtaaatcgcccatcattattagatcgtattacgggtaacacaagtggttcaaatctcggttcaagtctattaggtaatcttccttcaggtagtagtttgcttgatggattaacaaatggaaatagcttacttgatggtataagtgatattcctaatccaacacaaggtttatcattaggtcatttaggcgatgatggtttacttagcggtttatttaatagtgatggaaatttatcattacctgcaacaggtgaagccattaagaaaaactggattccaattgtagcagtgattgctattgcaggcggtgcgcttgtatggttcagtcgtcgtaaacatcaccaatctaataactaaaccaaaaataattatgagtaaataattaatgccattgaacattaattatttactctatttttatatgttgcgttgttacacttaaattgacaactcaacatatgtaaaagatgtatccaaagtatgaatcatagtcaatttactttaaatcatcattgaatgtcatatgcattagacataaacttgaagtgtgaaaaaacaattttaaaatgactcaattgtaattatgacgtggcacatgttgaagtgattaagattaaaggggtggggagcatggaacacagtgaacgcgtatcgcatatagcatctgataaaaaagagaaaaaacggtttcgattaaaaatgcctggtgcatttacaatattatttattttaaccattattgcggtgttagcaacttggattgtgccagcaggtgcgtattctaagctttcttataatccaggagcgcatgaatttaagattgtcgatgcacatcataaaacaacgacagtcccagggacacaagagcaacttgataaattaggtgtcaaaattgatgtgaatcaatttaaatcaggtgctatcaataaaccgatatcgattcctggaacttacgagcgcttgaaacaaaagccagcgggtcccgatcaaattacgacaagtatggtaaatggaacgattgaagctgtcgatgtcatggtatttattcttgtgcttggtggtttaataggcgtcgtacaaacgagtggtgcttttgaatcgggattattagcattaactaaaaaaacgaaagggcatgaatttttactggtctttatggtatccatcttaatgattttaggtggaacgttatgtggtattgaagaagaagcggtcgctttctatccagttctggtacctatttttatagcgatgggctatgattctattatatgtgtaggatctatttttctggcgagttctattgggagtacgttttcaaccgttaaccctttttcagtagtcattgcctctaatgctgcaggaacaacatttgtagatggattatattggcgtattgctggacttattgtagcaaccatctttacgattggttatttatattggtacgccaaacgtattaaaaaaaatcccaaactctcttatacttatgatgataaagtgaagtttgaacgacaatggtcagtggttaagaataatagtgaagacagtatctttaccttacgtgaaaaaattattttaatactctttatcttgcccttcccaattatggtttggggcgtcatgactcagggatggtggttcccgattatggcgtctatgtttttagcctttaccattgtgattatgcttattgtcgcattaggtaagaatggattaggtgagaaaaaagtggtcgatgcatttgttaatggtgcatcaagcttagtaggcgtatcattaatcattggtcttgcacgtggtattaataggattatgaatgatggactgatttcagatacagtgttaaatttttcatcatcactcgtaaaacatgcgaatggcccactgtttattcttgtattattgattatctttttcttcttaggatttattattccttcatcatcaggattggctgtacttgccatgccaatatttgcaccacttgctgatacagtaggcattcctcgatttgtgattgttacagcgtatcaatttggacaatatgcgatgctatttttagcaccaacaggattgattatggctacattgcaaatgttggatatgaaatactcacattggtttaaatttgtatggccaattgtcgcttttgtatttatctttggcggcggcttattagttgcccaagtattagtatattcataataaaaaagaggctgggacataattcctaacaaaatagccagtaaatgagtttattataaattcatttactggcttctttatttacaatactacgtattgttggctcgctttcttaggggacagcttcagcctgttatgtccctctgcatcaatggcacgatataaataactccattttccttttattttgatgtacgtctcatcaatacgccatttgtaataagcttttttatgctttttcttccaaatttgatataaaatcggggcatattcttgaaccccaaaaaatatgtaatactaatattctatccataaaaagtatgcgcttaatattaattaaaacctattatcagtagtgtatatcaatatatattatgaaactgttgacataagaaaagattataggtagttaaaatatatatcttatacataatcaataaaagttgaatttaatgtatttgacatagaggaatttttttacatttctttttcgttaactcagcatatcttgtagttcactatattggaaagtatttattataaaatatttctatgtttttgctaagtcttgtctttctatattttcgagtactaataaaaaaactttctcactaatatttaatgttttaaagatcactttactttcctctttaatcgacattattatattatgttctatatcttgaaacaacatttactatctcttatttatctagatgacgatataaagttgctctacttatgtttgttttttcttttatttcatctagagtgtaatttttgctcatatacatttctatagcatctctaagatttttatcatctcgtttgggtctgcctaacttttttccttcttttgtataattttctaatccaacgcgtgtcctaaatttaacaacatcactttgaaagtctgtaatatcatgtagtatttctaaaaattctccttgaatatttttataaatatatcggtttaaattaattacatataaagatatatccttctgtgaaagataatctaatatatctactaattgtttcgtagaatctgcaagtatacataaatctgtaatatatactgcatcccccgagaccaacttcttttttaaaagaaggtctaattcatttctttttttattattagcatgactttcctcaactattttttttgtataggtttctattttctttttttgttcgtttaaatcatcgtttattgtaacaggtctgatataaccgtatttcatttacttgcaccaccctatagctaaagtataacaggaaagtttcattaaagggtacacatatgaaacttttctgttatactttacaatataattaaataaaaaggagagtaagttatggttgaaaaattaaaacatgaatggtttaaccagccaggtaaaaatatacttgccggtatcgtggttgccttagctttaatccctgaagctatcgcattttcaattattgctggcgtagatccaatggttggtttgtatgcttcatttatcatcgctgttgttactgctattgttggtggtagacctgcaatgatatcaggtgcaacaggggctgttgccttattagttacaccacttgtgaaagattatggtgtagaatatcttttagctgccacgatattaatgggagtaattcaattagttttaggccttctcaaagtggggcgtttaatgaaatttatacctcattccgtcatgataggttttgtaaatgcattaggtattatgattttcatgtcccaaatagaacatatcttcggtatttcaatctcaacttatatatatgtaattgtaacattactcattgtatatataatccctaaatttttcaaagcaatacctgcaccattaatagctatcatcgtattgactgctctttatatgtatacaggttctgacgtgagaactgttggtgatttaggaaatattaagcaagctttaccgcactttttaattcctaatgttccctttaatttagaaacacttcaaatcatttttccatactcgctatctatggctattgtaggtctagtagaaagtttacttactgctaaaattgtagatgatgcaacagacacttatagtagtaaaaacagagaatctcgtggccaaggcattgctaatatgattacaggattattcggtggtatgggaggttgtgccatgattggacaatctgtaatcaatgtcaaatcaggtgcaaacagtagattatctactttttctgctggtgttgtcttaatattcatgattattgttcttggaggacttgttgttcaaattccaatgccaattttagcaggtattatggttatggtttcgattggtacatttgattggaattcttttaaatatattcaaaaagcaccaaaaacagatgcagttgttatgatacttacagtgataattgtactgatgacacataacttagctctcggcgtggtcgtaggtgttattttcagtgctttattctttgctactaaaatatcaaaagtagaagtaacatctgagaagtttggtaaaactaaccgtttatcttttaaaggtcaaatcttttttgtttctattgactctatgatggatcaaattagctttaatattgaaaatagtattatagaattaaactttaataatgctcatttatgggatgattcagcagtagatgctattgatacaatggtaaggaagttcgaagaaaaaaataacattgttcatgtagaaaaactaaattcagatagtcgtaaaatagtctcagaattaagcaaactaaatgaaaatcatttaaactaaggagtgttgtttatgtataaatcaattttattagcagccgatgggtcagaaaatagtttacgttcagcacaggaagttttgaactttatagatgaaaatactatagttactttaattacagttgtaaatgttgaagaatcgaaaacagatgttttacatggtaaacaaggacatagtttaacaaatgaaagagaagacaaattatccagtataactgaactatttgtagaacataatgtaaattatgaagtaaaaattgcacatggtcttcctgcagaaacagtggtttcagttgctaatagtggtaaatatcaagcaattgttttagggtctcgtggtctaaatagtttacaagaaatggtattgggtagcgtcagtcacaaagtggctaaacgttcaaaaattcccgttatcattgtaaaatagtctgtctaactcaatccataaaaggattgagttttattttgagacgactaagggtaccttagtaatttaataaagtctattttacaatataaaaaaacaatacacagtaatgtgtattgttaattatttcagtatataaactttaacgtaatcataatttcaaataacattttaagatatttatttttgttcacataattactgattatcagaagtttctttaatataaataaaagcactataagttaagttgcttatagtgcttatttaatatatttttttcaaacaatcattagccaccaaacaaacgactccagaaaccttttttagtttgggtttcttctatagcaatacctttatcattttctttttgtttttctccatcttgttgattctcagatatacctttagattgaaccactggatttatttcttctttctgatattgattagtatttacagaatcagaagtatatgatgcttcttgtacatcaaagttttttcgatcgttagtagatttatcgaaggaataattcagttgtctctcttcctctaattgattttccaatttttgaatctttttattactttctaaagctaaaatttgttgattctctaataatttatttaatgtattgacattgctattttgttgatctaattgtttagttaaattctcaatatatttttcatcatttttagctctagtttcaaagatttctatttgcttttctaattcgtttacttttgtttttaatgtctcagaactatttgaattattatatatatacttttcaacttttgcagtattttcatcaaacaattctttttttactgattctttattttgggttgttctctctttcttagtgattttttctataattttcaaataatcattatcattaatataattaattccattttctttttcaaaagatatatttaatcttttagcattattaacaatagtttgtttagttacacctaattcatcagcaatcattttaatagttttcataataccatccttaggtacctaatttagtacctaaattttaccatctaatgaaatttatttcatcatttagcgataaatttactatctattaactacctaaatacctaattacccacctataaatttttttgattcttaattaggtactaaaataacgaattatatatttggtggttttaggtgtacttttaattatatttaaaactctttatatacgccattgaaagtgttaatattactttataaatattaaaagagtcgatgctattggcgtagcatcgactctcggtaataaaacgattcgcactcgtttgtttatatatttttttgatacttgtattatatatatctaatcatctaagtgcaagcacaaaacatataacttacgtaaaaattgttttattacctcaatcccaaaaatggaaatgaggtttttattatgcccaattttgaaaaatacaatttatcacaagtaaaaactgaaagattttatcaactgcctaaatatttatttgaagatgcatattttaagaaaatgtctgcagaagccaaaattatgtatgcgttattaaaagatcgttttgaattatccctccaaaatgaatgggtggataaaaataataacatttactttattttcagtaataaacatttgtgcgaatacttaggttatgcagaacaaaaaattataaaattgaaaaaagagttaataaaatttaatttactaactcaagaacgtgttggacttaataaaccaaatagattatacctattaaaacctaattataacattaaagccagtcataccaaggaacttccaaattcacagttccagaacaatgaatttggaagttctagaactgtgaatttaagtggtcaagaacttccaaattcacagtctaatgatactgattataatgatactgattatattaagactgagagtaatgatacggatgatttgaatgataataaattaaattatcctagtaatcacacaagtcattcaaatcactactattcaaaatttaatgatgacgctttaaaatttcaactacttgaagaactaccacaaagtattcaaaattatttaaataacttttctgtagatgaaattaaacttattaaatctgtattattaaaagccaaaacatccttcaacaactccattgatacatattacttattagaagacatggaaatagaaatacttcacgttcttaaacgttttaaagccgtgcttattcaaaaaaatgaaactgttgaagcaatgcaaggatatctcatgaaatctcttaaatctgaatttgctgaagtgcatacgcttaataagcgacgggataatttaccaatcacttctttatttaatacttgattaaagctttcttggccaactttatattcaaggaaatataattatgtacatagatgggtctaaaatttttcggttttagtcccatcttttaatttttcaatttcattttctcttgatcttgtttttacttatataaacattgtaaaactaatatttttgatactatcttcaacaacttatctgttattttattcaagtgcaattccaagtatttgtacgtatgataaattacttctttttatatttattgggtttatttgtattaatgtagttggaataaatctttaacaattcttctgtttcatcaggacttaaatgctcacattcaaaatacttttcaagcatggcgccttttcgaatcagtctatgcgctctttcttttctatctaaattttttattctattttttcttaattcagctttttcaattgcagcatttgtttttttgagatgtttaaaatcatccataatatcacttactattctaattaattttgttttctgttaaattttcgttgttcccgttgctgttattttgttccatatctttattaaattcttcaatgactttatccatgattttatacaattcatcactagagttaatcatatttaaatcaagtttatttaaaaaataaccaccaattttattagatagttgtgcttcttgttttttcttttgttctttcagttgttcaatttgttgttctaattgacttaattttgtaatatctgtttgtttgattttagacattaaaaaactcccttaatttatctatataaagcatatcataattcattgggtaagtcgcacgttcatggtataatataaccagttcttaagacactgcccatttacatgcaaattaaaaattggcataaaaatgggcaaccctacaggttgattattatagttcccacaggggtttaaattcaaaaaagagaggaggtaaaatcatggagaaaggttactttatgttgagagtgactaatattaatcgagcaacaaaaaatatcgttgcatcagcatcttatcgttctgacgaagcattatatagtgaacgtacagatgaaaaaattaagtttagaaatcatacagtaaaacctgaaagcatgattttaacccctcaacatgcgcctgattggacgaaagatagacagcgtttatggaatgaagtcgataaagttgaaaagcataatgcgaaaacgaaaaaccctagattagccaaagaagtcttgttaagtttacctaatgattttgatagagaagtacaaacagaattaacaaaagattttataaaaagtgagtttgtagacaaaggaatggttgctgatatttcaattcatagagatgatatgaacaatccacacgctcatgtgttactgactcaaagaccttttaatgcagacggtacttgggggaaaaagacaaaaacgaaaacacgatatgatgaaaacggtcatgcgattttaaatcaaaatggtaataaagttagaaaacaagaacgctttgccgattttgatttcaaagaagttcgtaagcattgggaattaaaattaaatcaatattcagaacgtgaacaaagtttaagacgatatgatagtcgttcttttgaagatcaagggttagaaaaaattgccgaaattccactgacaagagaagaatatcgactagaaaaaaatgagcaaaaacgttgtgaaaaagagggtattgagtaccaacccgttacttattacggacaaaaaaatgaacagattagacgatataatcgtggtgaagtatcacaaatattcagtgataaagagaaagaacaagcacagaatgaaattagattatttactcaaaatgctaacgaacaagtaagtaaaaatgaacaaagttattctattttatttgatagatatcaacgtgatgttggctattcagaggcgaaagaaacaattaaaaatacgtttgacagtgcgtctacctttggtcgtaaaattcaaaatgacttacttaaaaatgaaattaagagacgtcaattgaaattctatgctaaaaattatgatgaaaattatcagtttagaaaagaaattgaaagtaaaggatatagtcaacaagagtttgttaatactgttgaaactaactataaagcgttactcaatgagaagaataagttagaaagtagagaggaaaaacgtaaagagatttatcaatcagctaaagatgtttatctaactgaaagtgaaaaaaatcatctcattgttcagcaaatgtaccctaaatctcatcatcattttagccatgatgaaaaagcatttattgttgatgaggcacaaaaaggtaatattataaaagcaactcatgttcaatacctattcaaacaaaataacaatattcctaatgatgtattgttggaagatacttataaaaaagcaagtaaggatattttctttagtgaaagacatcttaaaagactagaaaaagatagctttgaatataacgctgagttgcaattcattaaagaaagagagaaagaaattgaaagttataaagaacatattgatgatgatttaagaatagatataggcgatagaagctttgaaaaagtcaaagaccaaacacctaatgaaaaagttcaattactcattaaacttgagaaatataataacatcgatcaagaaaaagttatcgaaaaacatattaatcaggtggatagaaataataatgacaatcatcttgaacatgaatatgaacaatctaatcacattcatttaccaaagataaatgctagtgacttccttatgtattatgcgaatgaaacagaaaaacaaaacaatattaatcataagaaaaagaagaagaaacaagatagaaataaccaaatgagaagatagtaggccgttgaaatgatacaaagttcattctttaataagaaacttaaacaaatgtggtacattggttttgttttaaagataatattgaaattcacgattatatacggaattttaacttattaaacagattgaaacgaatgtcggcatagcatgagctattaagccgaccattcgacaagttttgggtttgttaagggttccgaggctcaacgtcaataaagtaattggaataaatatatgtttttactattaatgatttcttagtgcaataatctaaaattcaattaaaattttggaggtaagttttggagtgtatttatgagatattaaaatcaatttttagtttcgttaaatttttgtatcagaatttttcttttccagttttatttcttatcatcatttttttatttaaaaaacaaataaaaaagattttgactgattttacagtgggtgaattcaaattccctagtggatcgataaaagtaacacgtaaaggtattgaaaaagatcagcaagagtatttaagacagtttgaaaaagaaaatgataaaagtatagaatttgatgctgatgagatgagcgctaaaatcggagaattatttggagtcgaatataaagatggtttgcctattgataattctggtggtggtggtgctccacctaaatcagaaagtcataacccatcagtttttaacgctcatctattttctatagtggctagtgaagattctttaaaagaagagtataattttttcggtttcaaagagaccattatatctttatatactgcctatttatctaattataaaaaagataagtgggttactaaaggtggtgctccttatcatgtttcaaatagagaagagagcttagagaagaaagcatttgatattataactgggtattatttggaagctatgaatactcgtaaaaaatggaactttaatactataaaatcttatcaaaagttaataagagttgtattggtttcttatcaagttatagagcgagaacttatggagaaaaacgaagaataattttcgtgtttcttcctgtttttggcgttttaagagtcataaatttataaaaaatatataagatacccctaaatgatctaaaaaagtatcttaaaattacaaataaggatattttaaataaggtctaagataaattttataaaaaagagtgtttattttatgtcaattaaacaaataaaagaacctgtatttcggttcttttttattttgagcatttttcacataaattttttgatttttagcacaattttttaggtttgttactctattaagattttttaaatttctttgtgttgttatattttcattttttatcactaatagacatctaatttaataatttttgctagtaactattatgaaaaaagaataagtttattaggtattttactaaaataaggattgttattgttagtttttaatatctatttaaacataagattactcatcaaaagttatctattatcgtatattcagagatgatataatatataggtcgcctatctctcaggcgtcaatttagacgcagagaggaggtgtataaagtgatgcttattttcgttcacatcatagcgccagtcattagtggctgtgccattgcgttttttactcattggctaagtaaatgcaataaaaaataggtgacatatagccacaccaacaaaaatccccccattactcgcaatagtggggggattggtgtataagtgaatacttattttcgttacctaaattataacactggttagcaaaagaatgcaaaacacttatatttaaaaagggggagtatctttgattagtgtcataagctatagtatagaaatatttaagtatttgtattcagaatttagttttccattattgataatggttattataataatattttacaaacagataaaaaatatccttgatgatttaactaaattacatataagttggaatgatcgttctatcggaatagagagggaaaaaaaagaaactgttgaattgatgcaaatgttacttaaagataaagttggcagtgaaggtaaatctgttatctatgaaggacaaagaggagcagggggagaagaattagatactcatgatcctatgtatttttccaatttaattacgagtaaaatatttttaattaatcaagtagaaaaatataataaattttttatagctgaaaagctttttgaaggttatgaaagtaaatgtatggaaaaatatggaacaaattatcacggagcaataatagagacaagagatgaaaatataatattaactgatgaaacaatacgtaaattttattttttaacgaaagacatagaaaaagagaatgaatatttgagcttagatgatttaaataaatttagacttttaatatttgcatttactcattgatatattaaaaattaaggtctaccctaattgaacaattaggagcccttgtaaaatacagtttctaaatgtatgattagggtgtatgagaaagggtgttgaaaatgatagttggttatgcacgagtatcaaccattgatcagaatttagatagacagattgaaaatttagaagcatttggtgctgaaaaaatattcacagaaaaacaatcaggtaaatcgattgaagatagacctatttttatagaaacattgaactttgtaagaatgggagatcgtttaatcgttgaatcgattgaccgtctaggaagaaattatgacgagattattcaaacggtgaactatttaaaagaaaaagaagttcaattaatgattacaagcttgcctatgatgaatgaagcaattggtaacccattattagataagttcatgaaagatttaatcattcaaattttagcaatgatttcagaacaagaaagaaatgaaagtaagcgtaggcaagcacagggaattaaggtagcgaaagaaaaaggtatctataaaggcagacctgtcctttactcaccaaacgcgaaagacccacagaaacgtttagtttatcaacgtgttgtagaaatgttagatcaaggaatttctattagtaaaattgctaaagaagtagatattacaagacagaccgtatatcgaattaaaaatgaaagaacaaaataattaataaaatgagtaaaaagtgattgtataacacattaggaaatgataatatgttatacaataacctgcttcttttaatttaaaattctaaactttattaaactgtaaaaatgataatttcaaacttcttcatatttttccctttaataagatatgaagacgaaacatctcttccaaaagataagtaaaaaagtgagcgttattatctatatagacaataacgctcacttttagtttcattgttatttttccaatccatcagttaaaacatctaaattatactctaaatatttaagataagtatcagctacgccaccttctttactaatttcatcagagtaaattggtttcttgtaaattgatacgccactttctttagatacggtttccattggacgcttatctacgtttgattctacaaataagtgagatggctcatttttatcaataaattttactaaatctttgatttgttctggagatccattctcgtccgtgtctatcgcccaaatataaccttcttttaggtcataacggtctgttaaatattggaaagcttgttcactcgctacaaaaacacgatctttcttaggaatatcgcctaattgtttttcataatcatcttcgatgttatgtaatttttttaaatatgctttttcattttctttataataatctttgttttttggatttctttcagataaagatttcgtgatatttttaatcattttttctcctactttcggatcaataaatgcatgagggttcacttcttttttgccatcttcatctttaatgtatttaggtttaacaccttctgatgtttttatcgcattttcttttgaaaaatcagaagactctaaagctttaaataaccaacctttactgccaccttctaaattcaatccattatagaaaaccaaatcggcactcgagatatgtttaatgtcatctggtttaggatcgtagtcatgcgggtcagtgcctgtaggcactaaatttttaacttcaacgtgctctccgccaatttctttaaccatatcatcaatcatagaaaaacttgtgaccactttgattttatctttatctactgattctaattctttatctgaatcaccgtctttatctccattactacaagctgctaaaacaacagaaagtgtaatggtgaataaaaataatatcacttttttcattataaaaatcctcctaagttaatgtttaatcattctccacaatagcccatttctaggtgctaagaagaatgtgataataaatatagctgtaataactaatacaataaccacacctgaaggtaagttaaatgtaaaactaaagaacaacccaataatagatgaaatagcacctatcaacgctgataaaagaatcatggttgatagtcttttagtcagtaaataagctgtcgaagctggcgtaatcaataaagaaacaactaaaataacaccgacggtttgtaatgaggcaacagttactaacgttaataacaccatgattgtgtaatggatgaattttgttggtaaacctgaagctgcagccatggttggatcaaacgttgatagtaaaaattctttataaaagatcactacaataattaagacaatcgcagcgacaataaatgttaatgttcgatcctgttctttaactgtcagtacattaccaaataaaatttccgttaaatctatggacgattgcgctttcgtaacaagtaaaacccctaaagctagaaaggcagaaaaaacaatacctatagatgaatcgcttttgattttactgttttggttaacgaaaccgattcctaaagctgccataatcccaaagactaccgcaccgtagaaaaaattaatgcccatcatataagaaatagctacacccggtagaactgcatgtgagatagcatctcccattagcgccaaacttcttaatacgatgaaacaaccaataacgccacagatgattccgatgacaacagaagttacaagtgctctttgaagaaaactaaactgaaataactcatgtataaattgactaatcatttttatccccactttcagaagggatcaaaatatttgtgccaaaggcttgtgctaagttatctcccgtaaacacattttcaacagaaccaaaatcgattaaatgtttatttaaaagaataaggctatcgaaatatttactgactttggataagtcatgatgaacaattaaaattgtttttccagattcagctagttcttttaataaatcaacaatgatattttcacttgtaatatcgatgccaacaaaaggttcatcaagtaatatcaaatctgttttctgaactaacgttctagcaattaacactcgttgaaattgtcctcctgatagctcccctatttgtcgatctttatattccgacatatccactttgttaagggcttctgttgccattgctttttcttttttcccaggtaactgccacggttttaaccgagggtatatacctaaaatgacacaatctaaaactttcataggaaacgttgtatcgatattacttttttgttcgacgtatgaaagatttttaagttgcttatgtataggcttacttttaaaaaatgtttgtcctttgtgtggtattaaattaatcattgctttaatcaaagttgatttacctgccccatttgggccaataatcccaacaatttgtccttctatcatttgtaaagaaacatcttgtaaagctcgggtttgattatcataaaccactgacaagttttgtacatctaacacgctattcccttctttcttcacttgcgtaaataatatatttaggttatcctaaatatattatttagtcaaacgaaaatttgaagtttggctagctatttctgctttaaaaatcaaaattgtaggtgggatcatgattactgatgcgcaaaagaaatatttgaaaattatcttccaattaggtggagacattgagctagtgtctaataaaatgttatctaaaaagttaggagcagcgcccccttcaattagccaaatgttagatcgattaaccgaagcaggttttgtcaaaagtgaacattatcgtggtgttatgttaactaagaaaggattaacttatacgatagaaatgactaacaatcatgagattattaaagcgtttttcataaaagtattaaatatcaactcttctgaagtcaaccaagaggttgatttaatcgaaaatcacgtatcagataaatttgttcaacgtttatctgaatacttaagaacaaaacaattttaaaaaggatgattaactatgaagctttttaataaaaagtacagtacaaagcaacaattattctctcccagccctcaaaataagaatacgaatcataaataaatgaggctgggacataatttctaacaaattagccagtaaatgagtttattataaattcatttactggcttctttatttacaatactacgtattgttggctcgttttcttaggggacagcttcagcctgtagtcttcaacttgtcctgttccctcaagagtctcgccaaaatactttgtatttatatgtaattttaggttctgttgcaaagttgaatttatagtataattttaacaaaaaggagtcttctgtatgaactatttcagatataaacaatttaacaaggatgttatcactgtagcggttggctactatctaagatatgcattgagttatcgtgatatatctgaaatattaagggaacgtggtgtaaacgttcatcattcaacggtctaccgttgggttcaagaatatgccccaattttatatcaaatttggaagaaaaagcataaaaaagcttattacaaatggcgtattgatgagacgtacatcaaaataaaaggaaaatggagttatttatatcgtgccattgatgcagagggacatacgctctatataaaaagaaccgcaggtctcttcagatctacggattttcgccatgccacgaaattagcatcatgctagcaagttaagcgaacactgacatgataaattagtggttagctatattttttactttgcaacagaaccaataagtttgtatactttgtggtagttcttcgagtaattgaaattttaaagcgtcatcattaaattttgaataatagtgatttgaatgacttgtgtgattactaggagatgttaatttcttatcattcaaatcatacgtatcattactattagtcttaatgtaatcagtatcattataatcagtatcattagggtctaaaatttgggattctggagtcccaaattttgagattctggaatcccaaaactcgggattctggagtcccaaattttgggactccttgttatcataggttgcagataaagtttgaatatttttttctacactaatatttgtttctatatcatgtaaatataatttattgggtctattaaaacctgtacggatttgttcaagtaatcctacttcttgaagttctttttttatttttgtaattgtatttttacttttatctaatatattctggaggctctcatttgtaaaaatgaaatatatatccccattatcatcgatccaattatttttaattgataaactaactctatcattgagaattgcataagtgactttggcactatcacttaattttttatatttttcattaacaaataatgctttatgtagcatataaaaattttgactagcttgatttttaatatttttacgagacataataaaaacctctttccaattaaatttgaatagaggtaataaaacattacaattccacataactttttgacttgcaaactgtcgatattgttgtatataatacatatatcaaattaaatagctaacgtattgtaacgttttattaccgagtcccaactattaccagtagttgggacttaaacgtattatcaacattatatcactaaaaaagaacacataaaagatattatagctttatcaaaaaccctttacaaacccttgatgtcatgattatcaagggtttgtaaagggtttttgaaatgataggtaaatatcgatataacaacatttatgataaaatttattgtaaagggttgataaagtatttataaagggttgatgatatgaagagtgtgaaagaaataagcaaagaattggaagttagtaaacaaactatatttaataatataaaaaggttgaatatagaaacgataaaaaaggataatacttcatttattaaaaatgatatcgatgttgaaaagataattcaaagagtaactcacaataaaaaaaaatatggatttgaagatactatcactaactcagaaaaagttaaaaaggataattcccacaaagaatctaaacataatgttcaaataattgaactgcttgaaaagcaaatagacaccttaaataaacaacttgaaaaacaagaaaagcgtcatgaagtgacaatagaattttataggaaagaattgcaagaaagatcaaaattacttgaaaaccaacaagtattaacattagaaagtaacaaaaaaatacaaagattggagtctgagttagaagaagaaagacaacttaattattctgctaataagagacaggactttgaagttcaagaaacaatgggggatacggattccataaagattgattcagataaccaagaagaaaaaatagtttctcagtttagtgatacgagtaaagataaaaacgagtataagcaacaaaatagtgaattgacaaaagacgataaattagatgatcaaaaagaagatatgataaatgaaaatcattcaaaaaaaagtttttggagtcggatattcggtaattaaaaatgaatgtaaaaggtgtatcaagagtttataaacccttgatacacctttgatagtgatgaaacttctgataatcatcagttatgttaaactctaacaaaaactaaattatcagaagaattatctagggtattaaacataggtaaatcaattttctatcgccaatagtataaacatcatccatattaatctgaagatagctacataattctttaacagcatagcctttatttgtataaggcgccataaactctattaaatatggtttgttttgaggtttctatgtttaatcatttaatttttcattatataaatcgaataattataaaaagtcatcatactttttattttttaaaaatatttgaaaatttaatagtaatccaattataagatcaaatatcattatcattataatcaaggcaactataatcactgtgacactcgttacataacaagctagtaatctccagataaaattgacattttcaccaattccataacttaacatattacaaagtagtaaaagaataataatacctatactgtaaattaaaattgtcagtgtatattttttaataactctattaggaaacaatagttcatctattaggttctttttcaccagtatctctcgttcaattctatctttgtcacagattttgattttactattttttattttttcctctaataaaataacctcgaacgatctgctaatttttaataaatatgcaggaaaagctaatgttaagcataatgtaattaattcatttacattgttcatgtaacttataaaatagatgaaagttgctactagtgctcctaaaaatatagttatattaagttctacatcaaatattttaaaaatatctgctctattcatcagttaatcatcctttcaaggtttattaatactaataaattattagatataggtatatcatattattaatttaagaaattgtcttttataattttacttaataataaaaaagtagaaccatttaaaattaatggttctactttttaactattactaattttaaaaataaactaatctacaatatctaaaaatatatgtttagtactatttttgtttagttatatcaagtgatttgggaattaacaaatagacaactattgaaatgataatcatgataatcccacctactaaagcagttgctacaaaagcatcattaaatgatgttacagcctcgtttgcaagctgttttatccccgtagctttagctacttcgacagcgcccactacagattcttcagctacatgagctaaatctccaactataccttttgatgaaaaagatgaaatatctaaaaatacacgataaagcatagaagataggctaccaagtactgctacaccaaaaacatttccaaggtcatacatagactcttcaacagcagctgcattacctgcttttgatgtaggtgtttctaacattattagagcagatgcaactgctagtgaagccgtaccagctccaactaaaattaatgctaaagccattgtagaatatgataatggatgaccaaagaaatacataataaacatgccaatggctgcaattccaattccggaaggtaacactattttcggtccaaatcgcgccgctaatccgggtgcaattggtgcaaacaccatatctcctattgccataggtaataggtataagccagctttaaaaggagaaagttcttccacaacctgtaaccattgtgaagctaataacaaaacagatgtcattgcaaacattgtcataaatgcagcaattgtaccagctgaaaatgatctctttttaaaaagtcttacgtctaacattggatcagaacttgataaattacgtttaacaaatatcactatcatggtaattgctaatactattacaacccatggaataatatctgctagtccttcttttgaaaattctttgatactccataccagtccaatcatgcctgcaattgataaaattgtagaaggaatatcccacgagtgagacttttcttttgataacttagactctggtaataaaaataaacctgctacaactgctattatcacaaacggtacattaattaaaaatgccgagtgccatgaaaattgctcaagtaaagctcctccgataattggtccaaaaacagcacctatcgatgaaacgattgaccatacagctaatgcagtggccctttctttagggttttcaaaaattactcttatcattgaaagagtagttggcattattaaagcacctgcaataccaagtaaaaatcgaatagctattacgaactctgcactttctgcgaaaaatatagctaatgaaacgaggccaaataaagcaaatccagttaataatgctttttttcttccccatttatcagcaaaggcactcaatggaattataaagccagctaaaacaagagagtatatatcaactatccataactgttgggtaccagaaggctctaactctcttactaattccggtaaagccataattaatattgtcatatccattgtaacaacaaacaaactaacagctaatactactagtgcagtccatcttttttttgatgtcatcatatcagtagtttttgtaaaaaatgaaatcatttaagttccctccaatccttatagaccgttcgaccggtctataaggattataatctatttttttacatattacaacaaaaaatcttgcgaaatttaaatggctgtattgtgttatacaattattctttgaattttttgtgctatcattgatagtacttaatactcattaaaggcgtgatgaacttgaaagataaaatactaggtgtcgcaaaggaattatttataaaaaatggatataatgccactactactggagaaattgttaaattatcagaaagtagtaaagggaatctttattatcactttaaaacaaaagaaaatctatttttagaaattttaaatatagaagaatctaaatggcaagaacagtggaaaaaggaacaaatcaaatgtaaaactaatagagaaaaattttatttatataatgaactatctttaacaaccgaatactattatccacttcaaaacgcaataattgaattttgcactgaatattataaaactaatagcattaatgaaaaaatgaataaattagaaaacaaatatatagatgcttatcatgtaatttttaaggagggtaatttaaatggcgaatggtgtattaatgatgttaatgctgttagtaaaatagcagcaaacgctgttaatggaattgttacctttacacatgaacaaaatattaatgaaagaattaaacttatgaacaagttctctcaaatttttttaaatggacttagtaaataattatatatatattcttgaaataccaataaatattatttctaaattacgttcattattgataaaaaatttaaatagtattactacacaaaaagagagtgcgaattcgcactctcttttttcttgtataattattaaaagatcatttcaataatataatatgagttttgagactctgtgagagcctcttatttgcattgacgacccatttatcaagatgatcccttatcatgcttaattctataaactgtctgtcttgtgatattaacttctttcgcaatcttactaattgctttcccttcttctaacatttccaccacgcgatgataaataatacgtttctgtgggtctttggcatttggtgaataaagtaaggggcgccctttatatacgcctttttccttcgcaacttgaattccttgcgcttgtcgacgtttactttcatttctctcttgttctgaaaccattgctaaaatttgaacgattaaatctttcataaacttatccagtaatggattgccaatcacttcattcatcataggtaagctggtaatcattaactgaacgtctttctcttttaaataactcacagtttcaataatttcatcataatcacgtcccaaacgatcaatagattccacaacgaatcgatctcccattctgacaaaattgagtgcttcttgaaatacaggtctattttccactgactttcccgactgtttctctgtaaagattttctccacaccaaacgtctttaaattatccaattgtctttctaaattttgatctatcgatgatactctcgcataacctataatcattcatcttcactccataattaatatacaccctaatcatacgttctaattgcgataatttcaacaacttattttgtatgattagggtgtactcaaagtgtacatatctataattaaaacttactaaaaataaatatagattttttctttgtaacagaaccgttcatttgaaggtcatctctatcataaatatttaaattaactaaaaattttaatcatctgtttaatacttatgaaatgtatttacggtaggtattaaaattgatgaaatttatataagtgctttcaatgaaaatgaccgtttatttatcctcctgatttaaggagttagaaatttcgaaaacgattctttccatttgttgcatttgttccatgtccagatatttaatacattatagaaaaccaaagaccatcactaattaaacgcagttttaaaatttcatcaggattgccttcgtctttaaaatgggcctcttttaatataagttctactctttcatacctaactctttcaatgccatcgtttcatacgccgattctcctgattccatagcaaactcagcgataaacattgggaatactgcattgagttctattatatgctctttcattcgtggccatatttcacctccagctttaccgtatgctgttataagttgctctaatccttcgtcgtcgaatacacgatggtgtcctataaagtccattgatgggtcggagtgggttgcttcagtccagtctatgagacctgtgacgtttgcttggttatctaccattatatgtcctggatgtaagtccccatgtatcatggtcgcatgtcgaggccatagttcgtcgttttctaaccattgtttccatctgttccataattcatctgatacgccataagtttctttaactttattcattcttctttgaaagtcattttttatttcttgtatggttttgatatttatatgctgaacgttaatgttttcttctggtatgttgtgtaaatctacgggtgtttcagctaatgtgttaataaagttttctggtaatggtttgtgttcaattttccatacataattttgtatttctggatctattgtggctgcgggtttacctgtaagttttgggtaagcaataaggtcttttgcatgtactttccacttcggtatttcaaatgaaacattcttctgtaagaagtctaccgtttgtttttcgggttttgttcgtttataaacgtcaggtcttcttggtagtctcaaaacccattctactccatgtttatcttttccaaatgcaacttgaaaatcaagtcccgattcattcaatgagattgtttgaggttggatgtgtaattgatatttttctgcacatttaataatttcattatgtcgagtcattttattggatccttatttctattatatttttcttgtgaacgtattttttatattgatataaatgaacctaatattcaatataaattagtgtatagtttttaagttatatcatgaatagattgtcctgttaattcccattttttatctgatacatgtttaacaaaccttgtatcatgtgatgtaaacaaaatgattccaggatatttattcataaacatttctaatgcttctaatgttttaatatctaaaaaattagttggttcatccaaaattaacatattcgctttcgttgaaaataatactgctaacgataatttcgttctttccccaccactcaaaacattacaagaacgatcaagtgcttcatttaaacccaagttatttaaaatagctctactgaatgattctgatgaatccgtttcatccattaaatattgcaataatgaaacgtcacgcatgtcttcataagcaagttgacgatagtatgccatttgcactttaggagaacaatcaattccctctatttggtggtaaatagcttcaagtaaagttgtcttacctacaccatttgcacctacgagcgctatatttttgccatatggtatttggaatcgtacttgtgttagcagtttttgacttcctttaaccaatgttagattttgtgcaatgattggataattattatggatatcataaattttattttgtgggaaattgaattcatgataactttgtggtttttcaacttcttccaaatgttccattcttttttcaatatgcttagcttgtttttgagcagccttctcaaccgtgcctttttgttttgatgcacttaaacgatctggtgctatacttttgtttttttgttttgatgatgcttgtgccatttgttgcgcttgatttcgtttagctttactggcttgggacaatctttgtttttcacttatatactgttcatattgacgttgttgttctaactgttcttgttcatattgattttgatactgtgtgtaattacctttaaacactcttattgtgccatcttcttgtatatcccaaattgtgtcagcaatttggtctataagtgctctatcatgacttactataattaaagtaccatagtaatattttaaaatatttttcagataatctttaccaattttatccaagtgatttgtaggttcatctaaaagtaatatcggactataatttgatatgacattagctaatttatattttgctttttcaccaccactcatactgtcggttgtatgcataggtatatggagttcactcattaaactaccgtctaacgtgttaaaatcattttccacatccatgttaagctgttcaaaatattgaatttcgccaaccgtttcaactgttccagattctggttttgttttttgagcaatcatatttagtaatgtggttttgccagtaccattacccccaataagtgctattttttcaaattggtaagcgtaaagatgaccgatgttaagtgatcgtaaatctgtcaatttatgattgatttggttaaatttaattgtatattgttccatatttatacactccttgtatatttaaaggacgtgtacgcaaaaaaatgagacaggctactcccgtctcattcacattacactttcaaacacttaaaaatttattatgatgttttagtatttgaaagcgtttattattcctatcgaaggataaaaaatgacataagtcatcctatgagtgtgtattgcggacaagcctttttgaattaatttagttttgtattcaaaaaggtttatttgagtctcatagaagctgtcattttaatcctccttcatcgataaaatagtaatgttaatataacattttgttggtttttttacaatatatctctaagtagaaagattatataacaaaagtataaaaatacaattttagattgattatacatctccttaatttagagtgtactcataaaatacggttctgttgcaaagttgaatttataatataattttaacaaaaaggagtcttctgtatgaactatttcagatataaacaatttaacaaagatgttatcactgtagccgttggctactatctaagatatgcattgagttatcgtgatatatctgaaatattaagggaacgtggtgtaaacgttcatcattcaacagtctaccgttgggttcaagaatatgccccaattttgtatcaaatttggaagaaaaagcataaaaaagcttattacaaatggcgtattgatgagacgtacatcaaaataaaaggaaaatggagctatttatatcgtgccattgatgcagagggacatacattagatatttggttgcgtaagcaacgagataatcattcagcatatgcgtttatcaaacgtctcattaaacaatttggtaaacctcaaaaggtaattacagatcaggcaccttcaacgaaagtagcaatagctaaagtaattaaagcttttaaacttaaacctgactgtcattgtacatcgaaatatctgaataacctcattgagcaagatcaccgtcatattaaagtaagaaagacaagatatcaaagtatcaatacggcaaagaatactttaaaaggtattgaatgtatttacgctctatataaaaagaaccgcagatctcttcagatctacggattttcgccatgccacgaaattagggatatgttagccagttaagggaacaacgacatgataaaatggtagttagctatatttttctaactttgcaacagaaccagaatattcatttaactcctcctatatagtgttttgcaatatttacgttttatagattattccaccattcaaagttatcttgtttaagtaattgatcgctttctttaggtccaaaacttcctggtttatactgtggtattgttacgttagattttttccattcagtacttatataatctataaattcccatgattgtttaagttcttcccaatgtacaaaattagtttgatttcctattaaagcatcacatataagtgattcataagcatccactacttggtttttatctattgagttataaattttcatattatgacttctattatttctatttgatttattttcataaatatatagtgatattttggcattaggttctatatttattaccagtaaattacaatcagtatcctcattattattttcatatcttaatgtattattgttttttttgaattctataacaatctctgttgcttttttacctaagcgtttccccgtacgaatataaaatggagtcccttcccatcttctattattgataagtacttttcctgctacaaatgtttctgttgttgaatcactatcaacacctttttcttcatgatatgacattatcggagtttcattaataataccattaatatattgtcctctaacaaaatatttgtgtacatcagcccctttcaaaaattttatattgtttaaaagttcgattttttttagtctaatatctttactatttctgctttcgggtttctccatagcaataagagtaagtatttgtagtgcatgattttgcaccatatctttaagcgctcctgtagaatcatagtattggcctctatcttcaatgcctaaagtttccgatagagttatttgaacatttgatatatacttgttgttccacaatggttcaaatattgtattaccaaaacgtaaagattcaatattttgcaccatctctttacctagataatgatctattctaaatatttcttcttctttaaaatactgtcttatgtgtttatttaagtcttcagcagatttcaaatcttttccaaatggtttttcgattattaatcttgaaaatccatttgtatcagaaagacctgattggcttatgctttgagttataattttaaaaaattgaggattcattgctaagtaaaataatctattgccatccaaacaatattttttatcaatatcattggaaagttcctttaatttattccaacttgttttatcttcaacattttgttgaaagtaaaatatgttatctaaaaataagttcaccatttcaaaattttctcggcttaataaaatttgttttactttacttctatattcttcatcacttatatcctctaaacccgtagaaatgataactaatttcttaaagtgaccctttttataaagattaaaaatagaaggtagcaatttcctgtaacttaaatctcctgttccgccaaatattgttattaatgatgataaatttttatccaaagcagttccccccttttacttgattagctagtttctggttttcattccgtaacagtaattatattactcttcatcccattgtgtgtggaacacaccttcatgatctttacgttcataagtatgtgcaccaaaatagtcacgttgtgcttggataagattagcaggtaaatcttcagaacgataactatcatagtagttcacacttgcagagaatcctggtgttggtacaccgtttttaacgcctgttgctacgacgtctcttaatgcctcttggtaatctgtaacaatatttttgaagtatggatctaataataagttttcaagttctggattattatcgtaagcatctttaattttttgtaagaattgtgcacgaatgatacaaccctcacgccaaatcattgcaagatcacctaattttaagttccattcgtgatcttcgctcgcttttctcatttgcgcaaagccttgagcgtaagaacaaatcttactcatatataatgcttttctgattttttctaagaattcttctttattaccatcaaatgaagcttgtggtccatttaatgatttagacgcgttaacacgttcttctttaatggatgaaatgaaacgagcaaatactgattcagtgataattgttaatggaattcctaattctaatgcattaatagaagtccacttacctgtacctttttgaccagcagtatctaatattttttctactaaaggttcattattttcatctaattcagtgaaaatatcaccagtaatttctattaagtaactttcgagttctccagcattccaatctttgaatgtttgagaaatttcagtatgactcatacctaataagtctttcatcattgcataactttcagcgattaattgcatatctgcatattcaataccgttatggaccattttcacataatgacctgcaccatttgggccaatgtatgttacgcaagatgcgccatcttgcgctttagctgaaatggcatctaagatatcactgactttattataagcggcttcttgaccgccaggcattaatgaaggaccagttaaagcgcctacttcaccacctgaaacgcccataccgatgaaattaacgccactttcagctaatgctttatttcgacgaattgtatcttgatagtttgtattaccaccatcaattaaaatatcatcatcatctaacagcggaagtagtgtatttatcatattatccgtaggactcccggccttaatcatcaacaaaattttacggggtttttctaatgaatctacaaattctttcaagttatacgcaggatatatcttttgataatgagacttttgaatagtatcattaatttcattattatctctactatgaatactcacagaatatttcttatcctcgatgttccacgcaagatttttccccataacacctaaacctaaaattccaatattactagacattgtatcctctcatttctttatagtttataacctacaatcttgcttcaagatcttttttcatatcttcaaatcctggtttaccaagtaaagcaaacatattttgtttatacgcttctacaccaggttgattgaatggattgacgcctaattgataaccactcatagcacatacgagttcaaagaagtacacgacatagccaaatgtttcttcatctaattgtggaatattaacaacgatattaggtacgccaccatcagtatgtgctaataatgtaccttcaaatgcttttgtattaacttcatcaattgttttaccagcaagataatttaatccatctaaatcgtcactatcttcttcaatagtaagatcatgttttggatgattcactttaacaactgtttcaaataagaaacgacgaccttcttgaacgtattgtcctaatgaatgtaaatcagtagtgtagttagcacttgaaggataaatacctttaaagtctttaccttctgattcaccaaataattgtttccaccattcattgaaatattgcattgacggttcatagttgataagcatttcagttgtataacctttgctatatagaaggttacggattgttgcatattgataagcaatattttcttctaatttgtcagaagataattctttacgtgcttttgctgcaccaatcatcatcgcttcaatattaatacctgcagctgcgattggtaataaacctacagcagttaacactgaataacggccacctacatcatcaggaactacaaatgtttcataaccttcatttgtagctaattgttttaatgcacctttttgtttatctgttgtagcaaagatacgttttttagcttcttctttgccatatttactctcaactaattgtttgaataaacggaatgcaactgctggttctgtagttgtaccagatttagaaatgacgtttacagagaaatctttgtcagctaaataatctactaattcttttgtatagcttgatgataaatggtggttctgttgcaaagttgaatttatagtataattttaacaaaaaggagtcttctgtatgaactatttcagatataaacaatttaacaaggatgttatcactgtagcggttggctactatctaagataagatttttttttttcaagcagaagacggcatacgagattcctctacgtctcgtgggctcggagatgtgtataagagacagtaatatgagagatcaaggggaatgaatgatgaaattacaaaaaaaagaaacggtatctatggtattgaaattagagaaattattgaaggatatagattctatatttagaattatttatgagaagtatcatttaaataaagaagaagtacttattttattaacgttatgggaaaaggggcctatgacattaaaagagatggatcaatacgttaatatcaagtcatataaacgaacaagaacgtataataatttagttcaatctgattgggtttacaaagagcgtccaattgacgacgaacgtacggttattatccattttaatgaagaaaaaaataaatatagaaatgaattattagattttattactactattattaaaagaaaatatgaatctttagaaaatagtttgaattcattgatgagcgtttaatataaaaaaacccgtaaattaaaactacgatttgatgttttaatttatgggttttaaaatttaacgtttttcaatcgcacatataaaaggtgcatgattaacttgattgataaattgatattttaatatgtgtgctttactttgatcaaagttttcgagatattttaataattcatctctttcgatttgtccttcctcatgtccatgataaatcactagtacaataataccttctgtacttaatagtttaaaaatactttcaatagcttgaatagtggtttcaggtttagtaacaatggatttatcacctttaggcagatatcccaaattgaaaatagctgcatccacgtttccgatgatatcacttggtatatcatttaagatattttcatgtccatcatgtatcaatgtaacatgtttaaaaggtgctattttttcttttgtatgttcaatagcttctttttgtatatcgaaaccaaacactttgccatttggaacctgttcagctaaaaatagggtatcatggccgttaccacaggtagcatcaataacaatactatcttcttgaatatgttgcttaataagtgttttagcaaaaggaagaatgcgttctaatttcatgaattcaccttagtattagatgtgtaaaacttaccttgataagattcacgacgtgctaattcatcatctatttcattgagaacttcccacttgttaacactccacattggtcctaccattaaatcaatcggtccatctccagtaatacgatgaataatcatgtctggcggaaggatttcaagttgatcacacactaagtttgtataatcttcttgcgtcataaattcaagcatacctttttcgtattgtttaaccattggtgtacctttaagtaaatgtaataaatggattttaataccttgaacatccatttgtgccacttctcgtgctgtttccatcatcatatgataatcttcacctggtaagccattaatgatgtgtgtacatacgttaatattatgtttacgcaatttagctacaccttcgtaatacgtttgcatatcgtgagcacgattaattaaatcagaggtcttttgatgaactgtttgaagaccaagttccacccataaataagtacgttgatttagttcagctaagtattcaaccacatcatctggcagacaatctggacgtgtagcgatagataaaccaataactccttcttcttttaacacaggttcatatttttcttttaaaacttctacaggtgcatgggtattagtaaatgcttggaagtaagcaatatatttaccttcactccatttttcatgcattcgttctttaatttgttggaattgtacttcaattggatcggctctatttcctgcaaagtcaccactaccagctgctgaacaaaatgtacaaccgccatgtgcgacagtaccatctctatttggacagtcaaatccgccatctagagcaactttaaaaattttctgtccgaatttattttttaaatggtaattccatgtatgatatcgtttattttcaaaggcatacgggaaatacttacccataacacattatcctttctatctaacttagttctaagtaaagattttaacatattttaatgttatagtgtttattatagttcgataaaaatataaagagaggacttaaaaattatgaatatacctagatcagtatggtggctagttataggaatggcattaaatataactggctctagctttttatggcctttaaatacgatttatatgaaagaagaattaggaaaaagcttgacagtttctgggattgttctaatgattaattcttttggaatggtagttggtaacttactaggtggaacgttgttcgataagttaggtggttatagaacaatcatgataggtactattacttgtttgcttagtacaacattacttaatttctttcatggatggccgtggtatgcagtttggttagtgctacttggttttggtgggggaatgattgttccagcaatctacgcaatggctggtgccgtttggcctaatggtggcagaacaacttttaatgctatctacttagctcaaaacataggtgttgctgctggagctgcaatgggaggtttcgttgctgaatttagctttaattttatcttcttagctaatttaatcatgtacgtattatttggaattgtagcctttacgcaatttaatttagaataccatgctaaagtgaaatcaccagatagtctagatatccaaagtaaagaaaataaaaaacgttttatagctttaatattattatgtgccatgtttagtatttgttggattggatacattcaatgggaaacaacaatagcctcatttacgcaacaaattaatatttcaatgtctcaatatagtgtattgtggacggtaaatggaattatgattttagttgcacaaccattaattagaccagtcattcgtttgttaaaaggaaacttaaaatatcaaatgtttgttggtattttaatttttatgttgtcattctttgttacaagttttgcagaacaatttaccgttttcttaataggaatgattattcttacttttggtgaaatgtttgtatggcctgcagtaccaacgattgccaattatttagcgccccaaggtaagcaaggtcaatatcagggtgtagtaaattctgcatcaactgtggggaaagcatttggtcctctaatcgggggtatattggtagatacattcaatatgagtgcaatgttcataggaatgatcattcttttattaataggaatgtttttcttatctatttttgataagggtctaccgaaacaatcacaacatgaaaatcgttgaaagacaacttgaaaattaaacatataaaatatgattaaccacttgcaattaggttacgaatctcataatattaaactgtattggagtagtaacttaaatacttttctaaagagagctagtggtggtgcaaactagcgttaagaattaagtgaacttgccgttaattaattgaatttaaaacatctcttactattataaagtgcacatgtaaaatgtgaatgagggtggtaccgcggctaaagaaagtcgtccctgtcaaaagtaatagtttgaggtgttttatttttattaggaggaaaatactttgggttataatcacaaagagattgaaaagaaatggcaaaattattgggctgagaataaaacattcaaagcaaacgataatttaggtcaaaaaaaattctatgcattagatatgtttccatatccatctggtgcgggattacacgtaggacatccagaaggatatactgcaacggatattatttctcgttataaacgtatgcaaggatataatgtattacatccaatgggttgggatgcctttggattacccgctgagcagtacgcgttagatacagggaatgatcctagagaatttactaaaaagaatgttcaaacatttaaacgtcaaattcaagaactaggttttagttatgattgggatcgagaagttaatactacagatcctgaatattataaatggacgcaatggatttttattcagctttataataaaggactcgcatatgtagatgaagttgcagtaaattggtgtccggcacttggtacagtgttatcaaatgaagaggttgtagatggtgtatcagaacgtggaggtcatcctgtatatagacgtccgatgaaacaatgggtattaaaaattacagaatatgccgatcgtttattagaagatttagatgaattagattggcctgaatcaattaaagatatgcaaagaaactggattggtcgttctgaaggtgcacgtgtgtcatttaatgttgaaaatactaatgacactattgatgtgtttacaacacgtccagatactatctacggtacaacattcttagtacttagtcctgaacatgcgttagtgaatgaaatgactactgatgacaaaaaagaagtggttaaacagtatcaagaagaagcatcaaaaaaatcagacttagagcgtactgatttagcaaaagataaatcaggtgtgtttactggggcgtgtgctattaacccattatcaggtgagaaacttccaatttggattgctgattatgtattatcgacttatggtacaggtgcagttatggcagtaccaggacatgatgagcgagaccatgaatttgctaagaaatttgatttacctatcattgaagttatcgagggcggaaacgttcaagaagaagcatatactggagaaggtgcacatatcaattctggcgaactagatgggctagataataaagaagcaatttctaaagcaattactttactcgaagccaaaggtgctggcgagaaaaaagtgaattacaaattacgtgactggttatttagtagacaacgttattggggagaaccaattccagtgattcattgggaagatggtacgatgacaactgtgcctgaagaagaacttccattattacttcctgaaactgaccaaatcaaaccatctggtacgggtgaatcaccattagccaatattgatgactttgtaaatgttgttgatgaaaaaacaggcatgaaaggacgtcgcgaaacaaatactatgccacaatgggctggtagttgttggtattatttacgatatattgatccacataatgagaatatgttagcagatccagagaaattaaaacattggttgccggtagacttatatattggtggagtagaacatgcggtacttcacttactgtattcaagattctggcataaagtattatatgatttaggtgtagttcctacgaaagaaccattccaaaaattattcaaccaaggtatgattctcggtgaaggcaacgaaaaaatgagtaaatctaaaggtaatgttgttaatcctgatgatatcgtagcatcccatggcgcagatacattacgcctatatgaaatgtttatgggaccattagatgcagctatagcatggagtgaaaatgggttagatggctctagacgtttcttagatcgtgtatggagattattcattaatgaagatgggtcattatctaataaaattgttgaaaataacgataattcattagataaagtttataatcaaacagttaaaaaagtgacagaagactttgatactcttaactttaatacggcaattagtcaattaatggtatttatcaatgattgttataaagcgaataacatttacaaaccttatgtagaaggatttgttaaaatgttagcaccaattgcccctcacgttagtgaagagttatggcaacgtttaggtaatcaagaaactattacgtaccaaccttggcctacgtataatgcatcattacttgtagatgatgagattgaaattgtagtgcaagttaatggtaaagtaagagcgaaaatcaatattcctaaagacttatctaaagaagatatgcaagagttagcattacaaaatgaaaatgttaaactatctatagaaggtaaagagattaaaaaagttattgctgtacctcaaaaattagtgaatatcgttgcaaaataatgaaggaggagttttataatggaatcaattacagtagatcaattaaaagagaaaatactaggatctaatccagtaaatattatcgatgtgcgaacagatgaagaaactgcaatggggacaattcctggagctaaaactattccaatggatcaaattgctgataacttaaatcaatttaataaaaatgaaacgtactacatcgtttgtgctgcaggtgttcgtagtgaaaaagtagcgaactaccttgaaaatgaaggtattcatgcagttaatgttgaagggggcatgcaagcatggggcgatgaaggtattgaaatagacagtatataatgatttataaatatttaaactataatacagaaaaacagcgaagttatgattcttcgctgttttttataatttaacttatttttaatatttttatattatttagttgtagtacttttaattttattatgatattatatttaagtgtgaatataatattatgtaagtgatagtaacaactatagcatacataaaacattttcattataacaattgacatcaagagagaacatcaaggaggaaacataatgaatctttttaaaaaacagaaatttagtattcgtaaatttagtgtggggacattttcaacgctaattgctacattagtgtttttatcacatcctggtcatgcagcaactcatgatgcagaaacaaatacaagtgcgccacaaacgaatgaaagtgcgacgattaataaacaaaatactaatattgaacaaccacataatgaaacaacgtcagcaaatacatctaattcaaatgaaaataatcgaaataatgaaagtaatacttcaagtgagcattcaattaaccgtgaacgtgaagaaggtacagtgaataatgtaattaatagcactgaaaataatacaaatcataatgagaaagtaacaactaatgacgtagttagtaatgaaaataatcatgaaactacaaacgttaatcaaccacatagaagagggaaacgttcagtagataacactcctaatactacaaatacagatccgatggctgtaaatgaacaaaatactggtcaaatcattaatgggacatttacagataattcacagggtgcgacgataccgactaagaatttagagtctgcaatgaatgaagcaaatactgtaccgggttggcatgtaaatagtaatgatcaaaccatcattccattaatttggggtcctaaatcgttgcccgcatacaatccttatatattcgataaaaccaataataaaattggtgtagtactatcaaaatacaatggtaactttaatcaagttccaggtatagctgatcctacagtaggatcaatttaccaagatgttgatgttactcctggatcagaaatccaattacattatatttctagtagtatgaataatatatggggggttaatggtgcaagagtgtatatttacgatgctaataatccttctacacttttatataaaggaactccggatatattacagaacccaattggtaactttgtaggtgtatttcaagtgccagaaacagtctcacgattaagattaagatttgaatcggcattaaatcgtagtactgattctactaatggacatagactccttactggtcctaataactttggaggcggagtgttagctgatgttaccattaatagtggcgcatatttaactgcgacagtaaataatacacactactttgcacaatctggatccataaatgctgatcgagtttatcaagaaatagggtttagaattgaaaatagaggacattctagttcaaataaaacagaatatacgattgttttaccagaagatgtgacatatgtatctacaaaaaatgctactggaaaatttaatgcagcaactaaagagttaacagttaaaatagatcgactggaagcaggagcaagtaaaaatatttctataggattatccttaccaactgatcgaccaattgaaaaagaattcttaggacatttgacttatgttacagatggtataaatatgaatagattaagtgattctaaagattttggacgtaataatggcgatcattatacaagatacggtgtgcataatgaatttgtaagtgttgattctgctatgcgacaaggagatattgtattagataaacaaaccattacagttaaaatgtataagcaacatttgagagacaaagtaacagaaattgaagatgatttagccaatcttgatcaaaacgataattcaccagaagtatgggaagcaatgcaagtggtacttagaaaagctaaagaagtattagctgaaacagatgagatgcctataagtgaattgaaagatcaagcaacgattaatagtatcgatttaaatttagataaagcacatgctaaattatcattagacaaagttgcaagaactaaaagagcgctctttatgggtaacgatacagctacaattgaagaaaaaaatgctgtgattgagcaagtgaatcaagcactacaatctagttatacaactgttgatcaatcaatgacttcaaatgatgtagcaacaaataaagacactggaattaatgaaattacaatgattgatcttactccaacagtaaagcaagcagcaattgatgaattaactgaaagagcaaatgctaaaaaagtagagtttgataataatcctgatgcaacagtagaagaaaaagaagctgcaaaaacaacgattgataatttagtgtcagaggctacaacaaatattatgaatgaaactacaaataatggtgtagcgcaacaaaaaacaagtagcatagatagtgtgaatgctgctactataaccccaactgttcgaagtatcgctagaacagcaatagataatatagcatctgcaagaaaagttgaaatagataaggataataatgcaactttagaagaaaaaaatgcagccaaaactgagatagacaatttggtagctagagcaaaagcagatattaacagtctaaatcacaataatgaaattgaaatattaaaagaaaacaaagtaaacgaaatatcacaagtagtagcgcatccagtaaagaaaaatgctgctgcacaagcaattgatcaagccgctatagctaaaaaacaagaaattgatttaatagaagatgcgactatagaagaaaaagaagtcgcaaaggtaaaagtagataaaatagtaaccgaagctaaaaataatattaatcaagcaactactaattcaagtgtagatgatgcacaaaatgaaggaataactgcaattaatgcagttattccagaagtggttaaaaaatcagatgcaagagatacaatcgatgaggtagcccgaattaaaaaagcagcaattgatcaaacacctgatgcaacagtagaagaaaaagaggcagcaatagcgaaaatagatcaagaggttactaaggctaaggaacaaattcatcaagcactaaaaaatgaaaatgtagatactgctaaaacaaatggtacgaattttattaatgcaatccaaccagaaattacgaaaaaaataaaagcaagagaggcaattgatgaagtagctagagctaagaaagaggcaattgatcgaatccaggatgcgacaacagaagaaaaagaagctgcaaaagcgaaagtagaccaagcggtaacggaagccaaaggccatatcaatgaagcaataaataattcaggtgtcgatgaagcaaaaacaaatggtacaactacaatcaatgcaatccaaccagaagtaatcaaaaaatcagaagcaagacaagcaattgatgatgctgcaagagctaaaaaagaagcgattgatcaaacaccgggtgcaacaacagaagaaaaagaggcagccaaagcgaaggtagaccaagcagtaacggaagccaaaggccatatcaatgaagcaataaataattcaggtgtggatgaagcaaaaacaaatggcgcaactacaatcaatgcaatccaaccagaagtaatcaaaaaatcagaagcaagacaagcaatcgatgatgctgcaagagccaagaaagaagcaattgatcaaacaccagatgcgacaacagaagaaaaagaagcagctaaagcgaaagtagaccaagcagtaacggaagccaaagctcatatcaatgaagcaataaataattcaggtgtggatgaagcaaaaacaaatggtacgaatacaatcaatgcaatccaaccagatgtgcttaaaaaagctgaagcaagacaagcaattgatgatgctgcaagagtcaagaaagaagcaattgatcaaacaccagatgcgacaacagaagaaaaagaagctgcaaaagcgaaagtagaccaagcggtaacggaagccaaaggccatatcaatgaagtaataaataattcaggtgtcgatgaaacaaaaacaaatggtacaactacaatcaatgcaatccaaccagaaataatcaaaaaatcagaagcaagacaagcaattgatgatgttgcaaaagctaaaaaagaagtgattgatcaaacaccagatgcgacaacagaagaaaaagaggcagccaaagcgaaggtagaccaagcggtaacggaagccaaagctcatattaatgaagcaataactaattcagatgtggatgaagcaaaaacaaatggtacgactacaatcaatgcaatccaaccagatgtgcttaaaaaatcagaagcaagacaagcaattgataatgaagtttttaataagaagacagagatcgacaataatgttgatgcaactatagaagaaaaagaagccgcaaaatcaaaagtagacgaagctgcagtagaagcaaaaaataatattaatcatacagaaataaatcaagctgttgatcaagcaaaagaagatggtgttacaacagttagtcatattcaaccaaatatagttaagaaaatagcagcaaagactgcaatcgatgaagtagctagaattaaaaaagaagcgattgatcaaacaccgggtgcaacaacagaagaaaaagaagccgcaaaatcaaaagtagacgaagctgcgacaaaagcaagaaataatattaatcgtgctttgtctaacaatgatgtagatcaagtagtacataatagtacggcatcaataaataatatccaaccagatatagttaaaaaagaacaagcaaaactaggtatagatactcaagcaaaaatcaaaaaagccatcattgatcaaacatctgatgcaacgacagaagaaaaagaagcagcgaaatcaaaagttgatgaagaggtaacaaaagcaaaacatagtattgatcaagcagtaacaaatagtgatgtagatcaagcaaaagatagaggaactgttgctataaataacattcagccagaagttgtaaaaaaagagacagctaagacttctattgatcaaattgcattaactagaaaaaacatcattgatcaaacacctgatgcaacaacagaagaaaaagaagcagcgaaatcaaaagttgatgaagaggtaacaaaagcaaaacgtaacattaatcaagcagttacaaataatgatgtgaatcaagttgagcataatagcacaatagcaattaataatattcaacccaatattataaaaaaaattgcagctaaaacgttaattgatcaagtagcaagagctaaaaaaaataatattgatcaaacatcaaatgcgacaatagaagaaaaagaagcagcaaaacaaaaagttgacgaagaagttacaaaagcaaaacatagtattgatcaagcaataacaaatagtgatgtagatcaagcaaaagatagaggaactgttgctataaataacattcagccagaagttgtaaaaaaagagacagctaagaatgctattgatcaaattgcattaactaggaaagccatcattgatcaaacacctgatgcaacgacagaagaaaaagaagcagcgaaatcaaaagttgacgaagaagtcataaaagcaaaacatggaattgatcaagcaaaaacaaataatgacgtagatcaagttgaacaaaatagcactacaatgataaataatattcagccgacagtagttaaaaaatcagaagcaagacaagcaattgatgatttagctaaacttaaaaaagcaactattgatttaacgcaagaagcaactgaagaagaaaaagaagcagcgaaaagtaaagtggatcaagcgttaacagaagctaaaactcatatcaacgaagcagaaaatgatgatggagttgatgaagcaaaaacaaaagggataaatgttattaatacaatccaacttgaaattataaaaaaagtagaggcaaaacatgaaattgaccaatctgcaattgctaagaaaaaaattatagatcaaacaccagatgcaactgaagaagaaaaagaagtagcaaaacaaaaagtagatgaagaagctacaaaagcaaaagataatattgatcaagctacaacaaatgatgcagtggatcaagcaaaaacaacaggaaatacagagatcaataatatacaaccagaagtggttaaaaaatctttagcaagacaagcaattgatgaagtagcaaaagtaaaaaaagaaaaaattaatcaaatgctagatgcaactgaagaagaaaaagaagcagcaaaacaaaaagttgatgaagaagttataaaagcgaaaaataatatagatcaagctacaacaaatgatggtgtgaataatgctaaaacaactggtaaaaatactattgaaaatatacaaccagaagtagttaaaaaatcagaagcaagaaaagcgatagatgaagcagcaactcttagaaaaaatctaattgatcaagataattcgacaacaaaagaagaaaaagacatagctaaacaaaaaattgatgatgaggttaataaagctaaaagaaatgttgatcaatcaataaataattccaatgtagataatgcacaaattaatggtataagtgcaataaataatataaatgcggtagctttgaaaaaaacacaagcaaaaaaatctatagatgatgaagtaacagcaaaaaaagcagaaattgatagtaatcatgaagcaacgaatgaagaaaaagaaatgacaaaacgtaaagtagatgaagcagcaacaaaagcgaaacataatgttgatcaatctacaacgaatgatacagtagatcaatcaactcaaattggaatttcaattatatctaatattcaaccagagacaatacaaaaatctttagctagacaagcgatagatgatgaagcaacaattaaaaaagcagaaattgagaataatcacaatgcaacaaaagaagaaaaggatgtggctagacaaaaagtagatgaagaagttataaaagcaaagaataatattgctcaatctacgactaattctgatgttgaaatagccaaagaaagtggtaaacatgctattgatgaaatccaaccagaaatagttaaaaaatctgtagctaaacaaactatcgacgaattagctaaacaaaagaaagcagaaattgatcaaacaccaaacgcaacaaaagaagaaaaggatgcagcaaaacaaaaagtagaagaggcagtaatgagagctaaaaaactgctcgaaggtgccaatactaactcagatgtcgatcagactacagagcaaggtaaacaatcaattaatagtattcaagttgaagttattaaaaaagcagatgctttatctaaattagaagtggaattacaaaaattaaaagataaagtatcatctgatcaaacatttacaatagatgaaaaactattcataaaacaaaaacttgatgaatcatataaaaaagcagaagaaaaagtaaaccaagctcaaactaataaacaagttgataatataaaaatacattatcttcaagaatttaataaaatagttctaatcgacaaagtaaaattgaaagctaaagcccaaatttttgatgtagcaaataaacgtaaagcgtatattaaaggattaacaaatatatcagaatataatagaaataaagcttataaacaaattgatgtttatgttatgaaagccttaaataaattagttgaaaatgtgactactaatgatattaatgaattaacgagagtgactattaatgagattgaacatgtgaatgttaagcaatttgaaaataactttggattggttaatgactgtctcttatacacatctgacgctgccgacgaaggcttaggtgtagatctcggtgggagcgaagacgaatatttaaagttacaacaatctgcggaaactttaaatatgagtgtgcctgctttcgttaagaaaaaggcacagggtagtcgattggtcgcaccaaaatttgataaagaaacgcgacaatcgatagctaagaatttaagcaagctaggatcaaatgctaatcaaattgctaaatattgtaatcaacatcaatatgaggcgccgaattatgaggctttagaatataatatcgaagaattgcgtaaaaggttggatgaaatatggaaagtcctaaagtaaatgtgattttaagtctaattttattcattgtctgtttagttatggttagctattttattttttatgcacatcgattttgggcaagtatcttttttttagccttagcctttatagatattattaaatgctatacatcttataaagaaatgaaagaacgtgatacaaatggccacagctaaaataagttcaacgaaatcaacgtcacgggctattaattacgctgaaaaacgggctgaagaaaaaagtggcttaaattgtgacatagactatgccaagggaagttttaaagcgacacgtgagttatacggaaaaacaggtggcaacgaaggtcacgtggttatccagtcgtttaagcctggcgaagtaacgccagcacaatgtaatcaacttggactggaactagccgagaagatagcaccacatcatcaagtagcagtttatacgcatacagatacagatcatgttcataatcacatagtcattaattcagttgacttagaaactggtaaaaaatttaataacaataaaaaagcattgcatgatattcgacgagctaatgatgacttatgtcgagaatatggcttaagtgtgccaaaacgtgatactgcaaaattgcgatatacacaagccgaaaagtcattgatagaaaaaggtaaaacttcttggaaagatgagttacgtgaagaaattgaaaatgcaaaagctcatacaagcaatttaaagcacttttcagagcatttagaagaaaaaggtatctcatttaaggtaaaaggcaagaatgtctcatataagcctgagaacgtcaataaatgggtgcgtggtaaaacactgggtcaagattacgataaggaggcgttagaaattgagtttgaaaagagaactaaacaacaacaacgacaagacaaactcgaacgtaccaaaccaaatcgagccgacgacacagggttatcggaagattggcgagattttggaagaacaacagatatccttgaacgagatagaaaacgtcgtgagaaagagcaggcagaacgagaacgaaaaactcgacttattgaagaagagaatcgaagaattagagaacgaacaagccaagaaagacaagcaacacgaaatgtatctaaacgaactaaggggttcgatctcgagctttaataacactatgaataaagctcaagataaattcatgagtgttgctactagttatctcaagaaaattaataccgataatcaagagcaagattttaagcaagccgttaattcagaatttggaaatatcatggatcaattaaaaacggtagataaaaagattattgagcaaacacgcaaagtgaatgaagatttatatgagtacaaaaaaagaatcgaaggaaaaataaatgaaaatgatgagaccattgacagtatgacaaaaacaaataagtttttagtcaaaggggtacttaatttattttttgtcattgttttagtttcattagtcatgcttgtaacaggaccaatcggagattatttcggtattgagaaactttatgactcaattaatcatgtaattaaaacagaggatagtaattggagatatttagcattactactatatcttgtgccttatgtattatttggactcattatatatggtattttaaaaatatttaaagctataaattagttaaaaaagctcttagtagaagttgtaagatcacgaaaagtcttttaaatttctaataaaattatttaacttttaagacttgtatattaagttcggagtttttgcttcgaactttttaatatatttttataaatctttttaaaaacctttttaggtaccatttgagccttagagtcacaatggattccacacattaaaagggactttttgccacattaaaagggactttttgccacattaaaagggactttttgccacattaaaagggactttttgccacattaaaagggactttttttaaaaaagtcccttttaatcattgaatgcccttaaaacagttgctattattaaattacaatttattataaatggtcgttacttagaaaagtcacttttaaggaaaggtgtatattatgagtggagaaacagtagtatatagaaatgaaatgaatctagtacctttaagacgatttacaagtactgaaattaatttgttttttgcaatgtgcaataaactaaaagaaaaagatactgatacattaaagttaacatttgaagaattgaaaacgctaagtaattatagttctgaaacacgtaatattaatagatttacaaaagaattggatgaagtgtataaaaaaatgcttgagttaactattaggtatgaagatgatgaagtaatagaaagatttgttttgtttaatcagtataaaattcacaaaaaagaacaatatttggaaatatcgacttcaccaaacttaaaacatattcttaattcaataaccaataatttcactaaatttgaacttcaagaaatgacacaccttaaatctacatatgctaaaaacatgtttagaatacttaaacaatttaaacatagtggttatgtaaaaataggaatagacgatttcaaaacacgtttagatatacctaattcttatcaaatgaatgatattactaaaagagtactaaaacctattattaaagaactaggaactatctttaataatcttaatataaacaaaattaaatctagaaaaggacgcaaaattgaatacttagaatttatttttgacgctgagaaacgtattcacagcaagcgacaacctcaaatgaaagatgtaggtaaacaaaaacaattagtaagccgagaaaaaacgccacaatggttaaaagaacgttcatatcatcaagaaatacaaaacgaagaatacgatcccaaatttgaagaaaaaagaaaggcattttctaaacagttggaagttgattgggaagaatagaaaagtttacaaattagaacgtgaaagctatactgaaactaacaaacagacagatacatcattagatgtgaaaaccccagcacgccgaccaaagcatatgctggggtttcttttttatcgtttatgttcttgatttaataaataaagaacacgcccaacaataattggacatacgatatacttcataacaaacagaacgacaatcattagatgtggcacctcctttctgcacaggaagtgcttttttagtatagcaaaatcctagaatttaaaacgatactttgaataaaaatgcaaaatactaactgatgaaaataaatgaaaacgtgtcatatcaatgatgtataaaacttgcataaacgataatcataaggaaaaggcttaaacgttgatttagcagcgtttaagcctttattactagttaacataattaagtattacaggcagtagaaatgtacatattattcatctttatttttctaatttttaatttataaaaaatatagttataataaaataagggatgtttattaagggattgtttaaattctaaaaaggagtttttacaatgaacaaaaacattaaaaaaatcgctattgctacaattgctacttctctattaggtggtcctgtatattctacagtagaatcaggtgtagctaatgctgagacagttaaaacagttgatgaagaaatggaacaaagagaaaaaatcggaaatgctttattagaagagatagataatagtaaagaagattttaaagatccaagtatagcagaaaaattaaaaggacaggttaaaaattataagaatggcgtatcagaaagaggaaaagctactatgacagctaaagcaggagccaaagctattagagctactgttaataaagttggagaaaaatcttggaataaattagtagctaaagtagaaaacactactggtacaaaattagttatgttccattatcaaagtattaataaattttgcgatattttaacaggatttgaaggtaatgtagctgatggtatagctaatacgttaactaataattttggttttaataaacaatttgcctatattgttgctagagctttcatagccattgttttataggtttttgtaatgagtaataataaaaaaatttatttattatttttgataataacttttattatttatgtatcattacctgttattattggtaagaatacattcgatgctcgtttatttgctatttttcctttactatttttgggagcatttttgttttcatcaaataataaaaaatagtgatttaacacctatcttaaaagatagagggtgtactttgaaatgagtttcttcttttcttgattaatttactttataaattttaagtggctagcattttagccacttattttttcgcagaaaaaatcctaggggcttggggatattccccaacaagccggcgacgctaccatgtatgtggctagcaaagccaatgcttgccaaaccactgtattacttgaataacctttgcatattttatatgcttaggttacgttaagtaataactttcgaagaaagcgtggtgggaatgaatgagtgaacgagacacatttgtggctagcgacgatactgttaggaaaaaccgtaaacctaaccgtaaggagcgtaaacaaattagctttcgagtgagcgaagacgaatatttaaagttacaacaatctgcggaaactttaaatatgagtgtgcctgctttcgttaagaaaaaggcacagggtagtcgattggtcgcaccaaaatttgataaagaaacgcgaaacgtcaaaggagcaagctcctcgtctgttcgctcgacttgcatgtattaggcacgccgccagcgttcatcctgagccaggatcaaactctccataaaaatttatgatgtttgattagctcataatactaaatagtgtttgtaacatttaagttactttattggaattaacgttgacatattgtcattcagttttcaatgttcgttttcttcaacacaagaattaattatactcgctatcgaaatgaaagtcaacaacttttttaaattaatttttttgtgtttttaatgttcgttgatttgtttcgctcaacaaataaatactatacagggtttctcccaaatgtacaatggtaaaaattacactacaaagagcaaaggatagaaactaacccacaaaacacgaacattatataaaataatttgttaatagttaatattaaagttgttttctttcagtttataactttttttacattacttttatctcataaaacaaacttttaaaaatttacattttttaaaataattttaaaaaaagctatttacagtgtgatttagtattgttgaaggcggaatatcctcgctattcaatactcatctactataaatagcacataaaaatttacatttcggttctaccagcaattgctttagaaagcgttacttcatcagcatactctaaatcgccaccaactgataatccttgtgcaagacgtgttacttttattccaataggttttacaagtcttgaaatatacatggcggtcgattcaccttctaagtttggattcatagctaatataagttctttaacttcttcatcttttaatctatcaataagtgtgggtatattgatatcttcaggtcctataccatccattggagagatagatccatgtaatacatgataaaggcctttatactctctcattttttccattgcaataacatctttatcatcttcaaccacacaaataattgaacgatccctttgtttatcttcacaaatgtaacacggatctttttcagtaatatgaccgcaaatactacaataggtaagttctcgcttaacatctactaaggctttagcaaattttacgacatcgtcttctttcatgtctaatgtataaaaagccagacgttgagccgtcttgggaccaatgcctggcagtttcataaaactatctataagttttgaaatcggttcaggataatgcatacttaacctacattcctggaatatttaagccttgagtatgtttacctaatcgttcttgcgttaaattatctgctttattcattgcttcatttgttgcagctaaaactaaatcttgtaacatttcgatatcatctggatctactgcttcttctttaatttctacatctacaacttctttatgaccagttacagttacggcaaccataccgccaccagctgttcctacaatacgttcgtctttaagtttttcttgttcttgtgccattttcttttgcattttttgcatttgcttcatcatttgttgcatatttccgccaccgcgcatcattcatttcctccttaaattttcacattaattttattataatttatatttcattatacatacgtttatatttattgtcatgtatgactcattcaacttaccttataaacaaactgatatattttattattcatctataatattcacagtatcttcaccaaataaatctctcgctttttgagcaatatcagacgtttcctctttagtattatcttttgtactttcagaagaatgatgatcattttgttttctatgattaatatactcgcttctcactctcatccattgatctgaagggacacctactacttcaacgtttttatcaatgatattacaaacgacgttttcaatgtttttccttttttcttcatctttattaacaatttcacaatgtatttcttcatcaaattgaattaatacacgttttctacttgctgctactggaattgagttttgcaataagctgactaaagattttttatcattacttttagcataatcaattacttcttgccaatgttctttaagtagttgaatatcttctttatttgcttcatctaacactttagctatctgcgtcatagaaaatgccgctttactttgacgtttatttctagaatgtgtgtttgtttgtgtgtgctttttattactctgtgaaataccttgtgcttttagagtttttaactcattttcaagttgttccattctttgtaataacacttcattattaggttctgtagcaacaggcgttgttgctacattttctactttcgtaggatttgttttcaccatttcagctaatttaactaataacacttcaaagtgtacattctgattcacactaaatctaatagaaacgagcgtatcatttataatatctatcatatgatataacgtttctaaatcaaattgagttaaggcatcgtaacttgtttgttcattgattgttttattcataatcgtatctcttacgaaataaatcatatcattaataagtctatttacttctttaccttcagatacaaagtgatgataacgagaaaatgcttcttttacatttccattaacgatatcgttaaataattcattaagcgatgcttcatctacactacccgttacgtctaatacatcttgtaaggtaagatgctcatctccaaaagcaattgcttggtccataatgcttaatgcatcacgcataccaccttctgatgctttagcaataaattctaatgccgcttcctcataatctagtgattgttcttgtgcaacaaaacgtaatcgttcgacaatttgttcggtactaatcgctttaaaatcaaaacgttgtgcacgtgaaataatcgtaggtggtattttatgcggttctgttgttgctaaaataaaaatagcgtgtgctggaggttcttctaatgtttttaataaagcattaaaagcacctgttgtaagcatatgaacttcatctataatataaaccttatattttgattcactaggtgcgtatttaactttatctctaatatttctaatttcatcaacaccgttattactagcagcatcaatttcaataacgtcaccatttgttccttgtgtaatgcctttacatactgcacactcattacaaggttcaccatcatggggatttaaacagttaatagctttagcaaacactttagctatacttgttttaccagttcctcttgggccactaaaaatatatgcatgagattgctttccttttgaaatagcatttctcaatgttttagtgacatgttcttgacctacaacatcattaaaactttgaggtctaaacattcgatataaagcttgataattcacagtcgcacctccaatacaattacttatcaattatatcatgcaatatctttgatatattaattttttatacttctatgatattggttgtagtttcccatgtggatattcacttaattgatcccacaagaatttcacataaagagacttatcatcatttttcgatataatatgatgttgtgccgctgatacataacctaacgctgtaaaatactcaggacaatcatctacaataatagcagtataatgatgagctttcgcacgctcttctacagcttgcactaaagcttttcctataccttggtttcgataagatgttgctacaatcaaagaagataattgtaatactttaaatgtatcttcattatcaatgagattcacttcatttagcatgatgtgccctataatgtccccatcttcttttttcgcaataacttctaattcataattatatgtaggttgttttcttaaattagaaattattttactatgtgatttaccatctaaacctttgttattagtataatgtttttcaagtttttctaaagtctcgatataatccatttcagttaaagtacttaaataaacttgcataacttccccctataattaacatgtttctaatcatatttctattaaatgaattgagtaaatgtatcagtgtatacacccataaccctcattataaaaataatttagggtgtttgtttttctcaacatgcctattttgaatatctgtatataagtatgatgtttatagttgttcgataacaacttatttaaatgatttaagaatctttatctgtattctaagttcttctatagtttatataaaaaaggagtgactttaaattaaagtcactcgtaaagtatatctatttatagaaatgattaattttaaattaaataaccgtgcaccttcgaatcgagtgtacatcataaacgttaccgaagtcgatagctaaatctcggctaccctacggcacatatgagtgtccacttaatgctgcttccgtcaggacctgacatgattcatgggttcatattgcataggaccgaaatcttcaaacacctcgtgcttcgggcagacttcacaaaagtacaccctcaacgaaggatttaagtctcgcataaagcggatttcgagtacagggaaccgctacctccccacctagcacggtaagttttataatactataaaacgtattaacgttgcaagtaaaatagtatatttatttataaatcattcaagttaaaaaccaattcaaaaatattactatttattttgtcgacgagaaaattcattcattgaatgatttgatttttttaaaatttagtacataaaaatgagtccgggacataaagtatctagataagtgaaaaaagacaatttctattgaaataatatagaaattgtcttttttataatttttttgattattttcagctcgttgagctgttacttttcttatcatgcatttatgccgagaaaacttattggttggaatgggctatgtgttagctaacttgttagcgagttggttggacttgaattgggattaatcccaagaaagtaccaactcaacaacacataaagccctgtaggttccgaccaataaggaaattggaataaagcaataaaaggagttgaagaaatgaaattcagagaagcctttgagaattttataacaagtaagtatgtacttggtgttttagtagttttaactgtttaccagataatacaaatgcttaaataaaaaaagacttgatctgattagaccaagtcttttgatagtgttatattaataacaaaataaaaaggagtcgctcacgccctgaccaaagtttgtgaacgacatcattcaaagaaaaaaacactgagttgtttttataatcttgtatatttagatattaaacgatatttaaatatacatcaagatatatatttgggtgagcgattccttaaacgaaattgagattaaggagtcgattttttatgtataaaaacaatcatgcaaatcattcaaatcatttggaaaatcacgatttagacaatttttctaaaaccggctactctaatagccggttggacgcacatactgtgtgcatatctgatccaaaattaagttttgatgcaatgacgatcgttggaaatctcaaccgagacaacgctcaagccctttctaaatttatgagtgtagagccccaaataagactttgggatattcttcaaacaaagtttaaagctaaagcacttcaagaaaaagtttatattgaatatgacaaagtgaaagcagatagttgggatagacgtaatatgcgtattgaatttaatccaaacaaacttacacgagatgaaatgatttggttaaaacaaaatataataagctacatggaagatgacggttttacaagattagatttagcctttgattttgaagatgatttgagtgactactatgcaatgtctgataaagcagttaagaaaactattttttatggtcgtaatggtaagccagaaacaaaatattttggcgtgagagatagtaatagatttattagaatttataataaaaagcaagaacgtaaagataatgcagatgctgaagttatgtctgaacatttatggcgtgtagaaatcgaacttaaaagagatatggtggattactggaatgattgctttagtgatttacatatcttgcaaccagattggaaaactatccaacgcactgcggatagagcaatagtttttatgttattgagtgatgaagaagaatggggaaagcttcacagaaattctagaacaaaatataagaatttgataaaagaaatttcgccagtcgatttaacggacttaatgaaatcgactttaaaagcgaacgaaaaacaattgcaaaaacaaatcgatttttggcaacatgaatttaaattttggaaatagtgtacatattaatattactgaacaaaaatgatatatttaaactattctaatttaggaggatttttttatgaagtgtctatttaaaaatttggggaatttatatgaggtgaaagaataatttacccctataaactttagtcacctcaagtaaagaggtaaaattgtttagtttatataaaaaatttaaaggtttgttttatagcgttttattttggctttgtattctttcattttttagtgtattaaatgaaatggttttaaatgtttctttacctgatattgcaaatcattttaatactactcctggaattacaaactgggtaaacactgcatatatgttaactttttcgataggaacagcagtatatggaaaattatctgattatataaatataaaaaaattgttaattattggtattagtttgagctgtcttggttcattgattgcttttattggtcacaatcacttttttattttgatttttggtaggttagtacaaggagtaggatctgctgcattcccttcactgattatggtggttgtagctagaaatattacaagaaaaaaacaaggcaaagcctttggttttataggatcaattgtagctttaggtgaagggttaggtccttcaatagggggaataatagcacattatattcattggtcttacctacttatacttcctatgattacaatagtaactataccttttcttattaaagtaatggtacctggtaaatcaacaaaaaatacattagatatcgtaggtattgttttaatgtctataagtattatatgttttatgttatttacgacaaattataattggacttttttaatactcttcacaatcttttttgtgatttttattaaacatatttcaagagtttctaacccttttattaatcctaaactagggaaaaacattccgtttatgcttggtttgttttctggtgggctaatattttctatagtagctggttttatatcaatggtgccttatatgatgaaaactatttatcatgtaaatgtagcgacaataggtaatagtattatttttcctggaaccatgagtgttattgtttttggttattttggtggttttttagtggatagaaaaggatcattatttgtttttattttaggatcattgtctatctctataagttttttaactattgcattttttgttgagtttagtatgtggttgactacttttatgtttatatttgttatgggcggattatcttttactaaaacagttatatcaaaaatagtatcaagtagtctttctgaagaagaagttgcttctggaatgagtttgctaaatttcacaagttttttatcagagggaacaggtatagcaattgtaggaggtttattgtcactacaattgattaatcgtaaactagttctggaatttataaattattcttctggagtgtatagtaatattcttgtagccatggctatccttattattttatgttgtcttttgacgattattgtatttaaacgttctgaaaagcagtttgaatagttatattatattttggtttagaactatgagtggctagcattttgccactcattttttgcgttagcaaaaacaggtttaagcctcgcagagcacacgtattaacgacttattaaaaataagtctagtgtgttagacttaaactattaaatacacatgaaacctttgtgcttaggagtgatttttatatgtcttattccattgttagagtttcaaaagttaaatctggaacaaatacaacgggcatacaaaaacatgttcaaagagaaaataataattatgaaaatgaagatatagaccatagtaaaacttacttaaattatgatttggtaaatgctaataaacagaattttaataacttgattgatgaaaaaatcgaacagaattatacagacaaaagaaaaattagaacagacgcgattaaacacattgatggtttaattacatcagacaatgatttctttgataatcaaacgccagaagatacaaagcagttttttgaatatgctaaagagtttttagaacaagaatacggtaaagataatttattatatgcaacagttcacatggacgaaaaaacaccacatatgcattatggcgttgttccaataactgatgatggtcgtttaagtgctaaagaagttgtaggtaataaaaaagctttaacagcgtttcaagatagatttaatgagcatgttaaacaacgaggatatgatttagaacgtgggcaatcaagacaagtaacaaatgctaaacatgagcaaataagtcagtataaacaaaaaacagaatatcataagcaagaatatgaacgtgagagccaaaaaacagaccatataaagcaaaagaacgataaattaatgcaagagtaccaaaaatcgttaaatacgcttaaaaagcctataaatgttccgtatgagcaagaaactgaaaaagtaggtggtttatttagcaaagaaatacaagaaactggaaatgttgtaataagccaaaaagatttcaatgaatttcagaaacagataaaagctgctcaagatatttcggaagattacgagtatataaagtctggtagagccttagatgataaagataaggaaatacgagagaaagatgatttattaaataaagcagttgagcgtattgaaaacgcagacgataattttaaccaactttacgaaaatgcaaagccacttaaagagaatatagaaatagcgttaaagcttttaaaaatcttactaaaagagttagaacgagttttaggaagaaatacctttgcggaaagagttaataagttaacagaagatgaaccaaaactaaatggtttagcaggaaacttagataaaaaaatgaatccagaattatattcagaacaggaacagcaacaagaacaacaaaagaatcaaaaacgagatagaggtatgcacttatagaacatgcatttatgccgagaaaacttattggttggaatgggctatgtgttagctaacttgttagcgagttggttggacttgaattgggattaatcccaagaaagtaccaactcaacaacacataaagcccctttattaattaaagtataacacactagacttatttacttcgttacataagtcattaaaccgtgtgctctgcgaggcttgtttttgtgcaagcacaaaaaatggactgaacaagtcagtccataagttcaaaatctgcgaccaaaaatggtggtcgccaattcgtttttaaattttataatcacttacgtgtacaaaatttaatgcactcaaaaattcaaaatcatttttttatttctcctgtatgcgtatcaacataactttgtccgtatttacgttcttgatacactgcgtcgaaatataatctaattaatccagtatgtgaacgtagaacactatttataattttcatactaggcaaattatagtcgctcccatgttctttcacaaagcgtcttaattctcttatgtttgctaaaccatgatcatctatcatatcgcaaacatcattcaacatttcctctttatcttctacatcaagcaccacatatctatcaatatcaaagttgctcaaaagctttatatcctttttagcatatttatatttatttttatcgatagcgtctttactttcatgcgttaaatacaaatacatattttccatactttgtttaactacttgtactttagctatacttttatttcctaatgctctttgtattcttttacgaacgctatgagttgtaactggattagcagcaacataaattacatgataatgtgcttttttatattcttgcccctctacgttacttttatccttatcatgtaatggactaatagccatcggaatatccattaattctaattccatttcccaattttctggaatactttctgggtatagtaaaaacgtgaagtatcttgctttatctgtactcataatgttaaaatcaccttactagagcttgtttttttatagtttgtataaagtgaaatccattctttgcgggagaggatttcactattttttttgctctaattcctttcttgaatattcttctaatgctaaagctaaaattgctgatttcgtaaaccctttttctttagctaatttctctaattcttcgatttgtttatctgtaagacttatttgtaaccttgtttttctaggcaaattaacacctcttttttctattttttcaagtgtaccacttaggtaacagtaaggcaaccaaatatacacaaaaaataaaaatgtcccttaaaatgtccctaaaatgtcccctaaatgtagcatgccttgagccttagagagagtagggatgaaaagcgtttttttttcaatttggcactcggcacttaaaaggggggtcgtagtagccccccccttgtcctccaaattttgaaatttaaaacccaaaaaccaaaaataaaaaagacctatatttaaatattagatctcacgtatcgttatatttgtatttaaatttctagcaatagacatagcatcaaaacttatttttggttcgggggtgtacatagtatgtcggtttaaccggctattagagtatccggttttaaaaaatatataagtactcctaaagccagtcatgacaaggaacttaaaaaatgtcggtacggaagtaaaattttgggacatcgaaagtacgctaattttgctgcattattccaatttccttattgtttggaaccaacagagcttgatatgttgttgagttggtacttcgttgggattaatcccaacaaaccaccaaccaactcgctaacatagttagctaacatatcgctcattccaaacaataagttttctcggcataattgctctcttttgctataattatatttagaaggccttacttctcctaacagaattaattaaaaaaagtgtagcaattctgatagaaactcgataaaagctcttagcaacctcgtaaattctgctaagagcttttttgctgatttatagttctaaatcaaagcctttatctttctcttgctttgtttttatcgttgcattattttcaaatgctatatgttttcttgatttctcatctttctgtttaaacataatcataacttctcgatctaacgcaatcatatttctaaaagcctttttatattttggatttatattatcgtcaattttattaataattcgtctataatttttatcgccaaatatatcttttcctaagtgacaaaccgcttttacaaacttccttgtattttcatgcttagtttgttcatcttcataagctgatttatagttatctttttctttagttagtttttcaaactttttatatgcagcattcaattttctacgattaccattaatttctcctcgttgatccaaaactgtcttttcaagcgattgaaccttttctccctttatcaattttctatattctggttccattctttttccaaaatctgcctgttcttttaatgttttataatcttcttctttcaaaatgactcgtcctgttggctcactttcttttgaaaataaacttcgctttttatattcatactcaaattcgttgtttagaggctcatacagaacattctttaaactttggtaatattcctcctcttcttcttttttggctcttatttgggctatatgtgcctctaaatcgttaaatgcttgttgtttatgattaatatcggcattcaaaccttttaatttatgctcagattgatcaatatcctgttttaacgttttaaactttgccttttcttctgctgttcgattttttatatcgtaaaattcatcttttagtttcggtaattttttttgttcaaatctatcaatcgctttactcatcttattgtatttattctttacagtctccaattggccttgcatagattcaaattgtaatttattatctaccgttaaattcttaaaatgtactactttacgcacttcttcatcttttctatttttataatactcagtatctcttttgtactgttcaacttctctatgttgtcgttctgttttatgtttcgatgttcctcgcttcaagtcatgacctttatgattgatatagtaattaaatctatcttgaaactccgttaatgcttttttgttacctaaaacctctttagcactcaaacgaccatcttctgttaaaggcacaactccaaaatgcatatgcggtgttgcctcgtctaaatgaactgtggcatataacaaattgtcctcgccatattcttcgcataagaatgctttactatcttcaaaaaattgttttatatctttatcacttttccctgaaaaaaattgattatcagaagtaatgattccatcaacatgtttaatcgcatcttttctgatttttcgtttaccgttataattttgctcaattttctcatctatcttttgattgaaatcaattgaattgggattaattaaatcataattcatataagattttgttaaatcaacgtctgcattttcatagtttttattttctctttgaacatgtttttggatacctgttgtattagttttacctttcacttttgacactcgaataatagaatagctcataaataaattacctcctaagcacatcatcatcgtggcctttattaattaaagtataacacactagacttatttacttcgttacataagtcattaaaccgtgtgctctgcgaggcttgtttttgtgcaagcacaaaaaatggactgaacaagtcagtccataaggacttgttcagtccattttttgtgcttgcacaaaaacaagcctcgcagagcacacgcattaatgacttatggcgatagcaaataagtctagtgtgttatactttaataaataaagctacgcaaaaacatgtgcagtgggggaattttaatatggcgtattctattatcagagttgctaaagtgaaatcaaaaacgaatacaaaaggcattcaaaaacatgtacaaagacaaaataaaaattatgaaaatatggatattgatttagaaaaatcatacttaaattacgatttagtcaatgatagtccgattgattataatcaaaaaatcgaagagaaaattgaacaaaattataatgggaaacgcaaaattagaaaagacgcagtaaaacatattgatggtttaattacatctggtaatgaattttttaaaaatcaaacacttgaagaaacaaagcagttttttgaacatgctaaaacgtttttagaacaagagtatggaaaagataatttattatatgcaacagtccatatggacgaaaaaacacctcatatgcattatggggtagttccgattacagaagatggtcgattgagtgcgaaagaggttttaggtaataaaaaggcactaactgaatttcaagatagatttaacgaacatatcaatagttgtggttatgacttgagtagaggtataacaaggggcgttacaccgagacgacatgagcagataagtcgttataaaaatttaacagattatcacaaagaagaatatgagcatgagagccgaaaattagaccgtataaagcaagaaagcgaagaagtaatggaacagtatcaaaatgctttagatgttctaaaaaagcctataaatgtcccatatgagcttgaaactgaaaaagttggtggactgttcaacaaagaaacacaggaaacaggtaacgtcgttattgataaaaatgaatttgatttattgcaggaacaagtaaaagcttctcaactcattactgatgattatgaatatattaaaagcggaaaagctttaaaagattttgaggaaaaaaacaaaagattagaagatagattattagacgaacagattaaaaatggaaaagtaatagatgaatacaatgatttagcggatagttataataatttattggaacaaaatcaagaaaaagaaaaagagttaaaccgttcgtataaactatttaacaatgtgtttaagttgattaaaggtgtgatgaaagaagaaacatatcattcgttgattaaccatattgataatcacttagaaagctcaaaaatgcgagaaacaatgattgtagatgataacgatgaacaattctttaagaaaaaatatcaaaggcatgaaccagaaattatttttgaagatgaacgagatgatggctacactttataaagacgacgcatttatgccgagaaaatttattgtgcgttgagaagaacccttaactaaacttgcagacgaatgtcggcatagcgtgagctattaagccgaccattcgacaagttttgggattgttaagggttccgaggctcaacgtcaataaagcaattggaataaagcaataaaaggagttgaagaaatgaaatttagagaaggttttgagaattttatagcaagtaagtatgtacttggtgttttagtagttttaactgtttaccagataatacaaatgcttaaataaaaaaagacctgatctgattagaccaagtcttttgatagtgttatattaataacaaaataaaaaagaagtcgcccactccccgaccaaagtttgtgaatgcgacttatccaaaagaaaaaacatattcggtgtgttttataactattgtatatctagatattaaacgatatttaaacatacatcaagagttatatttgggtgggcgacttcttaaaaataattaaggagtcgatttttatgagtacagaaaattattcaaattacttacaaaataaggatttagacaatttttctaaaaccggctactctaatagccggttagacgtaaacgaattttacattgctgaccctaaaattacttttgacgctatgacaattgttggaaatcttaataaaaataacgcagaaaaattatcgaaatttatgagcgttgagccacaaatacgcctttgggatatacttcaaacaaagtttaaagctaaggcacttcaagaaaaagtttatatcgaatatgacaaagtaaaagcagatagttgggatagacgtaatatacgtgttgaacttaaccctaataaactcacacatgaagaaatgctttggttaaaacaaaacattatcgactacatggaagattgcggttttacaagattagatttagcttttgattttgaatatgatttaagcagctactatgcaatgactgataaagcagttaagaaaacagtattttacggaacgaatggaatgccagaaacaaaatattttggtgttcgtgacagtgatagattcattagaatttataacaagaaaaaagaacgtaaagataatgcagatattgaaattagttcagaacatttatggcgtgtagaaattgaactcaaacgaaatatggttgattattggaatgattgctttaatgatttacacattttaaaacctgcttggtctacattagaaaatattaaagaacaagctatgatatatttattgattaatgaagaaggtaaatgggggcaattaacaagacctacaaagattaaatacaaaaatatgataaaagaaatttctccgattgatttaacagatttgatgaaatcaactttaaaagcgaatgaaaaacaattgcaaaaacagattgatttttggcaacgtgaatttaaattttggaaatgatttaaatattataagagctctccggacttaagaagagctcttatttcatttcttattttgattttcgttattacaacgttcattttttaattcatcaacatctttttctaattgcttaactttagaaaaatgatttgaaattaatttgataatgtaaacaaccaaaataactaaaagaatattaagaatagtgattattgttgttccgattgaaaaagtttctgttgctaacccaaacatatttgacctccaaataatttttaaaataaatattatgaatattatactctataattatttttatctttttttgaattttgagtgcattaaattttaatcacgtatgtgatcataaaatttaatgacgaattagcgaccaccatttttggtcgcaggttttgaacttatggactgacttgttcagtccattttttgtgcttgcacaaaaacaagcctcgcagagcacacgcattaatgacttatggcgatagcaaataagtctagtgtgttatactttaataaataaagctacgcaaaaactgcctggcaacgtcctactctagcggaacgtcagtccaactaccatcggcgctaaggagcttaacttctgtgttcggcatgggaacaggtgtgacctccttgccattgtcaccagacaaatgaatgattatacattcaaaactagatagtaagtaaagatttgcgtcgcaaaacttgaaaaaattgattaagtcttcgatcgattagtattcgtcagctccacgtgtcaccacgcttccacctcgaacctattaacctcatcatctctgagggatcttataaccgaagttgggaaatctcatcttgaggggggcttcatgcttagatgctttcagcacttatcccgtccatacatagctacccagctatgccgttggcacgacaactggtacaccagaggtatgtccatcccggtcctctcgtactaaggacagctcctctcaaatttcctacgcccacgacggatagggaccgaactgtctcacgacgttctgaacccagctcgcgtaccgctttaatgggcgaacagcccaacccttgggaccgactacagccccaggatgcgatgagccgacatcgaggtgccaaacctccccgtcgatgtgaactcttgggggagataagcctgttatccccggggtagcttttatccgttgagcgatggcccttccatgcggaaccaccggatcactaagtccgtctttcgaccctgctcgacttgtaggtctcgcagtcaagctcccttatgcctttacactctatgaatgatttccaaccattctgagggaacctttgagcgcctccgttaccttttaggaggcgaccgccccagtcaaactgcccgcctgacactgtctcccaccacgataagtggtgcgggttagaaagccaacacagctagggtagtatcccaccaacgcctccacgtaagctagcgctcacgtttcaaaggctcctacctatcctgtacaagctgtgccgaatttcaatatcaggctacagtaaagctccacggggtctttccgtcctgtcgcgggtaacctgcatcttcacaggtactatgatttcaccgagtctctcgttgagacagtgcccaaatcgttacgcctttcgtgcgggtcggaacttacccgacaaggaatttcgctaccttaggaccgttatagttacggccgccgtttactggggcttcgattcgtagcttcgcagaagctaaccactcctcttaaccttccagcaccgggcaggcgtcagcccctatacatcaccttacggtttagcagagacctgtgtttttgataaacagtcgcttgggcctattcactgcggctcttctgggcttgcaccctaaagagcaccccttctcccgaagttacggggtcattttgccgagttccttaacgagagttcgctcgctcaccttagaattctcatcttgactacctgtgtcggtttgcggtacgggcacctaatctctatctagaggcttttctcggcagtgtgaaatcaacgactcgaggaaacaatttcctctccccatcacagctcaatcttaagagtgccggatttgcctaacactcaatctcactgcttagacgtacaatccaatcgtacgcttcgcctatcctactgcgtccccccatcgattaaaacgattataggtggtacaggaatatcaacctgttatccatcgcctacgcctgtcggcctcagcttaggacccgactaacccagagcggacgagccttcctctggaaaccttagtcaatcggtggacgggattctcacccgtctttcgctactcacaccggcattctcacttctaagcgctccacatgtccttgcgatcatgcttcaacgcccttagaacgctctcctaccattgtccaaaggacaatccacagcttcggtaatatgtttagccccggtacattttcggcgcagtgtcactcgactagtgagctattacgcactctttaaatgatggctgcttctaagccaacatcctagttgtctgggcaacgccacatccttttccacttaacatatattttgggaccttagctggtggtctgggctgtttccctttcgaacacggaccttatcacccatgttctgactcccaagttaaattaattggcattcggagtttgtctgaattcggtaacccgagaggggcccctcgtccaaacagtgctctacctccaataatcatcacttgaggctagccctaaagctatttcggagagaaccagctatctccaagttcgattggaatttctccgctacccacagttcatccgctcacttttcaacgtaagtcggttcggtcctccattcagtgttacctgaacttcaacctgaccatgggtagatcacctggtttcgggtctacgaccaaatactatacgccctattcagactcgctttcgctacggctccacattttctgcttaaccttgcatcagatcgtaactcgccggttcattctacaaaaggcacgccatcacccattaacgggctctgactacttgtaagcacacggtttcaagttctctttcactccccttccggggtacttttcacctttccctcacggtactggttcactatcggtcactagagagtatttagccttaggagatggtcctcccagattccgacggaatttcacgtgctccgtcgtactcaggatccactcaagagagaatatattttcaactacaggattattaccttctttgattcaactttccagatgattcgtttaatatattcctttgtaactccgtatagagtgtcctacaaccccaataagcaagcttattggtttgggctcttcccgtttcgctcgccgctactcagggaatcgaattttctttctcttcctccgggtactaagatgtttcagttctccgggtctgccttctgacaagctatgaattcacttgtcgataacacaacataacttgtgctgggttcccccattcggaaatctctggatcaacgcttacttacagctacccaaagcatatcgtcgttagtaacgtccttcatcggcttctagtgccaaggcatccaccgtgcgcccttaataacttaatctaatatagttattaatctgtgagtgttctttcgaacactagcgattattttttatgaacttgttgatgttgatccacttaatgacgtgcttgcacttgttgaatcactcacgcttgttgatgttgatccacttaatgatgtgcttgcacttgttgaatcactcacgcttgttgatgttgattcacttaatgacgtgcttgcacttgttgaatcactcacgcttgttgatgttgatccacttaatgacgtgcttgcacttgttgaatcactcacgcttgttgatgttgattcacttaatgatgtgcttgcacttgttgaatcactcacgcttgttgatgttgatccacttaatgacgtgcttgcacttgttgaatcactcacacttgttgatgctgactcacttaatgacgtgcttgcacttgttgaatcgctcacgcttgttgatgttgattcacttaatgacgtgcttgcacttgttgaatcactcacacttgttgatgttgattcacttaatgacgtgcttgcacttgttgagtctgaaagactcgtacttgttgatccacttaatgatgtgcttgcacttgttgagtcactcacgcttattgatgttgactcacttaatgatgtgcttgcacttgttgaatcactcacacttgttgacgttgactcacttaatgatgtgcttgcacttgttgaatcactcacgcttgttgatgttgattcacttaatgacgtacttgcacttgttgaaatactcacactaactgattctgatgctaagtatgaaggcaaatcaaattctggtaatgatgtactttctggattgcccatactatgtgattctgatgcactatctgttgtgcttgcgcttgctgagtctgaaagactcgtacttgttgatccacttaatgacgtgcttgcgctatttgaatcgctcacacttgttgatgctgatccacttaatgatgtgcttgcacttgttgaatcactcacacttgttgatgctgactcacttaatgatgtgcttgcacttgttgaatcactcacgcttgttgatgctgattcacttgatgatgtgcttgcacttgttgaatcactcacgcttgttgatgttgactcacttaatgatgtgcttgcacttgttgaatcactcacacttgttgatgctgactcacttaatgatgtgcttgcacttgttgaatcactcacacttgttgacgttgattcacttgatgatgtgcttgcacttgttgaatcactcacacttgttgacgttgattcacttaatgacgtacttgcacttgttgaatcgctcacgcttgttgatgttgattcacttaatgatgtgcttgcacttgttgagtctgaaagactcgtacttgttgatccacttaatgacgtgcttgcacttgttgagtcactcacacttgttgatgctgactcacttaatgatgtgcttgcacttgttgaatcgctcacgcttgttgatgttgactcacttaatgatgtgcttgcacttgttgaatcgctcacgcttgttgatgttgactcacttaatgatgtgcttgtacttgttgaatcgctcacgcttgttgatgttgattcacttaatgacgtgcttgcacttgttgaatcgctcacgcttgttgatgttgactcacttaatgatgtgcttgcacttgttgaatcgctcacgcttgttgacgttgattcacttgatgatgtgcttgcacttgttgaatcactcacacttgttgacgttgattcacttaatgatgtgcttgcacttgttgagtcactcacacttgttgatgttgatccacttaatgatgtacttgcgctatttgaatcgctcacgcttgttgacgttgattcacttgatgatgtgcttgcacttgttgaatcactcacgcttgttgatgttgatccacttaatgacgtgcttgcacttgttgaatcactcacgcttgttgatgttgatccacttaatgatgtgcttgcgcttgctgagtctgaaagactcgtacttgttgatccacttaatgacgtgcttgcgctatttgaatcgctcacacttgttgatgctgatccacttaatgatgtgcttgcacttgttgaatcactcacacttgttgatgctgactcacttaatgatgtgcttgcacttgttgaatcactcacgcttgttgatgctgattcacttgatgatgtgcttgcacttgttgaatcactcacgcttgttgatgttgactcacttaatgatgtgcttgcacttgttgaatcgctcacgcttgttgatgttgattcacttaatgacgtacttgcacttgttgaatcgctcacgcttgttgacgttgatccacttaatgacgtgcttgcgctatttgaatcgctcacacttgttgatgctgatccacttaatgatgtgcttgcacttgttgaatcactcacacttgttgatgctgactcacttaatgatgtgcttgcacttgttgaatcactcacgcttgttgatgctgattcacttgatgatgtgcttgcacttgttgaatcactcacgcttgttgatgttgactcacttaatgatgtgcttgcacttgttgaatcgctcacgcttgttgatgttgattcacttaatgacgtacttgcacttgttgaatcgctcacgcttgttgacgttgatccacttaatgatgtgcttgcacttgttgagtcactcacacttgttgatgttgattcacttaatgacgtgcttgcacttgttgaatcactcacacttgttgatgttgattcacttaatgacgtgcttgcacttgttgaatcactcacacttgttgatgctgactcacttaatgatgtgcttgcacttgttgaatcactcacacttgttgacgttgattcacttgatgatgtgcttgcacttgttgaatcacgcatttatgccgagaaaatttttggttggaatgggcaatgtgttagctaactagttagcgagttggttgggaattgaattgggattaatcccaagaaagtaccaactcaacaacacataaagccctgtaggttccaaccaaaaagcaattggaataaagcaattatttatttatatttttcagtatgttataatttttttatattgttgagtttaaattttagatctgtatacttacgtttttcgtcttttttattttattgattgcagttttttactaggttttaaacttgtaaaaaactgcttttttatttttagaaaaaaatatattaaagtatgctatgatatgggtatacttccaagaaagtatttttttatagcgttttttaaatttttttatttatcttcatttctttatttcctcttagctaagaatttaattcttgctaagagttttttttttaggctatgataatgctataaaatatctcgatttttatgagtttattttatgtctttggatcttattttctctttaaaatcattttttccctgtagcttttagtgatttttaattgctaaaagctgcttaatttttagtgataatgaattttgttaaaataaagttatagtcttcgagatgtgtatttcaaattacattcactttgtatttttttgaatgatttttactttctcttttagttaagatattagttcttactaagagatttttttatgtgtatttttaggtgtttggaaacgagttgaaaacgagtttcttcttgtcttgatactatatagaaataactatctttttgaaatttaggtgtaatcgttgatataacagcgtttatgcctttttttaggcgtgaaagaaaaaattgacataaaaaaaccccagtattaagatttaattgtcgagaaaaaaccaaaatactggaggtccttatatgcatttttatactacaagatgtgtagacgaaaatcaagataatgaaacattgaaagatatgacaaaaagtgggaagcaacgcccatggagagagaagaaaatcgataatgtaagctatgcagatatacttgaaattttaaaaataaaaaaggcttataacgttaaacaatgtggtaacgtcttagaattcaaacctagcgatgacgggtatttgaagttatataaaacatggttttgtaaatcaaaattatgtcccgtttgtaactggaggcgtgcaatgaaaaatagttatcaagcgcaaaaagtgattgaagaagtggttaaagaaagaccaaaagcacgttggttgtttttaactctttcgactaaaaatgcgattgacggagaaactttagaaaatagtttgaaagaaatgactaaggcttttcataagttatttaaatataaaaaagtgagtaaaaatttaattggttttatgcgttcaaccgaagtgaccgttaataaaaatgacggtagttataatcaacatatgcatgttttgttatgtgttgaaagtgcgtattttagaaaaaaagaaaattatattactcaagaagaatgggttgatctttggcaaaaagcacttcaagttgattacaaaccagttgcaaatattaaagcgattaagccgaataaaaaaggtgataaagatatacaagcagcaatcaaagagacatcaaaatattcggtaaagtcatcagattatttaactggtaatcatgaaaaagatgcagaaattgttagtgatttagaacaaggtttgcacagaaaaagaatgttaagttacggtggtttacttaaacaaaaacataaaattttaaatttagatgacgcagaaaatggcgatttaataaaaacaagtgatgatgaaacgataactgacgaagaagaaaaagcacactcaatcactgcaatttggaattttgaaaaacaaaattattttttaaaaaatatgtaacgttagctggaaagctagcgttttttttatgcttttttgcccctgcaggaactatagcgttcaaccagtatggttgaccagtttttatgccaatttttaaatttgcatgtaactgggcagtgtctaaaaaaattcgacactggttaagcaaaaattttaggtttgtttttctgatttttaaatttagctcatatttgcgttttaagagccgttaaatcattttgggtataaatatatataaaatacccctaaatactctaaaaagtaccttaaaattacaaataagggtattctataatttgaaatatcttagataaaaataaaaaagagccacttcttaaaaaaagaaatggctctgggcgattttgatttagttaaaaattagtagtcacgaaatatggaaaactaaaattgtgtgtcctaatgtgtccatatggacattgttattttaaaaataaagtgtgaataaagcaataaaattatttagcttttggtttattaaaaatcaggacacgcatttatgccgagaaaatttttggttggaatgggcaatgtgttagctaactagttagcgagttggttgggaattgaattgggattaatcccaagaaagtaccaactcaacaacacataaagccgagtccgggacataaagtatctagataagtgaaaaaagacaatttctattgaaataatatagaaattgtcttttttataatttttttgattattttcagctcgttgagctgttacttttcttatattaagtgccattagcacaaatcctagttctcttttggctttatttatccctcgaacggacattcgagtgaaacccaaaatagccttcataaatccaaaaacaggctccacatcaatttttctttgactgtagatggtttttatttttggttctgaaagctttttattaatttgggctttaaaatattcccaattataatttttcattatttttttattcgtttttgaattgtatttcatgcactggtgtctcagaggacattctgaacaatcatcacattcatataatttgaagtctctcttaaacccatatttatcatggcgataggcatatcttttaaaacccaatcgcttattgtttggacaaatatattcatcgttaatttcgtcataatcccaattttgagtgttaaagatgtcgcttttatattttttagttttatcttttataaacataccgtaggttataagtggtattcgattaaaatcatctataattgccatataattgggttcgctaccataacctgcatcagctacaatatattcaggtaaatgaccgtaggtctcttgaattaaatttaaaaatggtatcatcgttcttgtatcagtcggattttgatacacattataagataaaacgaattgagaatttgtcgctatttgtaaattataacctggcttgagttgtccatttttcatatgatcttctttcattctcataaatgtggcatcatgatctgttttagaataactatttctatcctttaaaatggatttttggacgtcgtatttatgctttcgcccagagtaatcattaatttgctttttgtattgtttaattttagttcttttgagccgtatttgttttcttattttagtacatttttcattatcgatatgttgatttaaatcttcgatttctttatccaaatgactaccaatcaaatctatttcttcctttgttaagtcattatcgtgatcttttttaatctcaggtatgattttatttgttatcaattcatgatagagtgctttagaatcttcattcatttttgtctcatggttttgaatactctttttccatacaaatgtatatcgattggcattcgcctcaactttcgtaccatcaataaaaatggcctgatcatctataagatgttgtttcaaacactgactatgaaattgaataaataatgattctaataaagcatctacttttggattgactctaaatcgattaatcgttttataagaaggcttttgattttgtgatagccacatcatccggatgctatcattaagtaatttttctatcttacgacctgaaaacacagattgtgtgtaggcatatagaatgacttttaacatcatttttggatggtatgaggttgcaccacgatgatgtctgaattcatcgaattcagttttaggaattgtttctacaatatcattgacatgtcgtgacatatcatttgtggggataagaactgaagtttccaatggtagagtaagttgagtcatgttataatctttatacataaggcacctcgttaatttagtttagtgatatttattaaattatacgaaagggccttatttttttaaagtatttcaatgtaaaattacatataaatacaaagtattttggcgagactcttgagggaacaggacaagctgaagactacaggctgaagctgtcccctaagaaagcgagccaacaatacgtagtattgtaaataaagaagccagtaaatgaatttataataaactcatttactggctattttgttaggaattatgtcccagcctcatgtgcttgcacttgttgaatcactcacacttgttgacgttgatgcacttaatgatgtgcttgcacttgttgagtcactcacacttgttgacgttgatgcacttaatgatgtgcttgcacttgttgagtcactcacacttgttgatgctgactcacttaatgacgtgcttgcacttgttgaatcactcacgcttgttgatgttgattcacttaatgacgtgcttgcacttgttgaatcactcacgcttgttgacgttgatgcacttaatgacgtacttgcacttgttgaatcgctcacgcttgttgatgttgattcacttaatgatgtgcttgcacttgttgagtctgaaagactcgtacttgttgatccacttaatgacgtgcttgcacttgttgaatcgctcacgcttgttgacgttgatccacttaatgacgtgcttgcacttgttgaatcactcacgcttgttgatgttgactcacttaatgatgtgcttgcacttgttgaatcgctcacgcttgttgatgttgattcacttaatgacgtacttgcacttgttgaatcgctcacgcttgttgacgttgatccacttaatgacgtgcttgcacttgttgaatcgctcacgcttgttgatgttgattcacttaatgacgtacttgcacttgttgaatcgctcacgcttgttgacgttgatccacttaatgatgtgcttgcacttgttgaatcactcacacttgttgatgttgattcacttaatgacgtgcttgcacttgttgaatcgctcacgcttgttgacgttgatgcacttaatgatgtgcttgcacttgttgaatcactcacgcttgttgatgttgatccacttaatgacgtgcttgcacttgttgaatcactcacgcttgttgatgttgacccacttaatgatgtgcttgcacttgttgaatcgctcacgcttgttgatgttgatgcacttaatgatgtgcttgcacttgttgaatcgctcacgcttgttgacgttgatccacttaatgacgtgcttgcacttgttgaatcgctcacgcttgttgatgttgattcacttaatgacgtacttgcacttgttgaatcgctcacgcttgttgacgttgatccacttaatgatgtgcttgcacttgttgaatcactcacacttgttgatgttgattcacttaatgacgtgcttgcacttgttgagtcactcacgcttgttgatgctgactcacttaatgatgtgcttgcacttgttgagtcactcacacttgttgatgctgactcacttaatgacgtgcttgcacttgttgaatcactcacgcttgttgatgttgattcacttaatgacgtacttgcacttgttgaatcgctcacgcttgttgatgttgattcacttaatgatgtgcttgcacttgttgagtctgaaagactcgtacttgtcgatccacttaatgacgtgcttgcacttgttgaatcactcacgcttgttgatgttgactcacttaatgatgtgcttgcacttgttgaatcgctcacgcttgttgatgttgattcacttaatgacgtacttgcacttgttgaatcgctcacgcttgttgacgttgatccacttaatgacgtgcttgcacttgttgaatcgctcacgcttgttgatgttgattcacttaatgacgtacttgcacttgttgaatcgctcacgcttgttgacgttgatccacttaatgatgtgcttgcacttgttgaatcactcacacttgttgatgttgattcacttaatgacgtgcttgcacttgttgaatcactcacacttgttgatgctgactcacttaatgatgtgcttgcacttgttgaataaaataaacattcaaaactgaatacaatatgtcacgttattccgtatcatctctacgagatgttccgaatatatccttagaaaggaggtgatccagccgcaccttccgatacggctaccttgttacgacttcaccccaatcatttgtcccaccttcgacggctagctccaaatggttactccaccggcttcgggtgttacaaactctcgtggtgtgacgggcggtgtgtacaagacccgggaacgtattcaccgtagcatgctgatctacgattactagcgattccagcttcatgtagtcgagttgcagactacaatccgaactgagaacaactttatgggatttgcttgacctcgcggtttcgctgccctttgtattgtccattgtagcacgtgtgtagcccaaatcataaggggcatgatgatttgacgtcatccccaccttcctccggtttgtcaccggcagtcaacttagagtgcccaacttaatgatggcaactaagcttaagggttgcgctcgttgcgggacttaacccaacatctcacgacacgagctgacgacaaccatgcaccacctgtcactttgtcccccgaaggggaaacttctatctctagaagggtcaaaggatgtcaagatttggtaaggttcttcgcgttgcttcgaattaaaccacatgctccaccgcttgtgcgggtccccgtcaattcctttgagtttcaaccttgcggtcgtactccccaggcggagtgcttaatgcgttagctgcagcactaaggggcggaaaccccctaacacttagcactcatcgtttacggcgtggactaccagggtatctaatcctgtttgatccccacgctttcgcacatcagcgtcagttacagaccagaaagtcgccttcgccactggtgttcctccatatctctgcgcatttcaccgctacacatggaattccactttcctcttctgcactcaagttttccagtttccaatgaccctccacggttgagccgtgggctttcacatcagacttaaaaaaccgcctacgcgcgctttacgcccaataattccggataacgcttgccacctacgtattaccgcggctgctggcacgtagttagccgtggctttctgattaggtaccgtcaagacgtgcacagttacttacacgtttgttcttccctaataacagagttttacgatccgaagaccttcatcactcacgcggcgttgctccgtcaggctttcgcccattgcggaagattccctactgctgcctcccgtaggagtctggaccgtgtctcagttccagtgtggccgatcaccctctcaggtcggctacgtatcgttgccttggtaagccgttaccttaccaactagctaatacggcgcaggtccatctataagtgatagcaaagccatctttcactatcgaaccatgcggttcgaaatattatccggtattagctccggtttcccgaagttatcccagtcttataggtaggttacctacgtgttactcacccgtccgccgctaacgtcaaaggagcaagctcctcgtctgttcgctcgacttgcatgtattaggcacgccgccagcgttcatcctgagccaggatcaaactctccataaaaatttatgatgtttgattagctcataataaaagctatacatataatcaaagccaaccccaccataaattttaattgtaaaataattgctttttgacttcgcgatatcgctttaatgatttggattggttgttaagttggaattaatccaacttaaaacctgcaccaatcgccactgaagtggctatcattttcgctttgctcgtcaaaaattttctcatttcacaatgtaaaatttaggtttggcaagcatcgtatttgctagccacttcattcgctatcgctcatttcgtgactgcaaatacacttgttgggggtaaacccccaatccccctgcaaaatgctagccacataacaaaattaatcgtaagcattaaagcattcccttcttttctatataaatatgaacgaagtgaataagcgtcggaaaggcagcaaaaagtttcctttttgctgttggagcatggggtttcagggggtgcagtatctgacgtcaatgccgagcgaaagcgagccgaagggtagcatttacgttagataaccccctgatatgctccgacgctttatatagaaaagaagatttaactacctaaattcttaatataggttgatatgatagcttttattaggaatttgtttgtagtgatttttgacatgttttgtagtgattttctttaacaaatgttgtgattatttcactacaatgataaaatatcaaacaagaaggaggtaaaaaaatgagagaaagatatggaacagtatataaagggtctcagaggctcatagacgaacaaacgggggaagtaatagaggtagataagctttatcgaaaacagacctctgggaacttcgtaaaggcttatatcgtacagttaatttcaatgttagatatgattggtggaaaaaaactaaaaatcgttaattatatcctagataatgttcatctaagcaataacataatcgtgacaactacaagagaaattgcaaaagcaacaaacacaagtacacaaacagttacaagaactttaaagatactagaagaaggaaacatcattaaaagaagaacaggtgctttaatgttaaacccagaattacttatgagaggcgatgaccaaaaacaaaaatacctcttactcgaatttgggaactttgagcaagaggcaacagaaaaacaagataatgcattatctgaatactattctttcaaggaatagcataatattaaattcatctacattatagacgaaaggactagctaacactagtcctttttttatatgtatagcttttgatctactcgttacactcgcagaaaaagctatacatataatcaaagccaaccccaccataaattttaattgtaaaataattgctttttgacttcgcgatatcgctttaatgatttggattggttgttaagttggaattaatccaacttaaacgctctatataaaaagaaccgcaggtctcttcagatctacggattttcgccatgccacgaaattagcatcatgctagcaagttaagcgaacactgacatgataaattagtggttagctatattttttactttgcaacagaaccaaaaatggtgattatatcattcggcaggattttacttattataattggggcacttattacagcatatggtttggaatctatattaatcccaaataacgtttctgacggaggagtcacagggattagtattgtaggttccactttgtttggtttacctttaggaatattaataggaataatcaatttaccatttatatggttaggttataaacaaatcggacgtaagtttgctatattttcaataataggtatcttatcattatctatattcacttcgattatgcatcatgtaccaacaattattgaaggtgattcactacttattactgtagttggtggagttgttattggattaggcatgggtcttgcccttagaaatggtggggcattagatggtatagatatgttagccgttttattatctagaaagttacctttcggaacaagtgatttaattttatttctcaatacattcgtatttatacttgtttctactgtttttggctttaaaggtgccattttatcagcgctcgcatattttattgcttcaaaagttatacatattattgaagaaggactaagtggttcgaaaacgtttaaaattattacaaaagattatgacattatgaataaagaaattaaagaaagactgggaaggtattgcacatttacaaaagtgactattgatgaagaaaataattcatttgtagaaatttcttgtgttattaataaactcgaagaacaaaaacttaaagaaattataaatgatgtagacccagacgcatttatcgcaatatatgatacaacagaagttaaggctggaaatatgaaaaaatcagatatatattaaaattacgataaataaaaaggttctgttgcaaagtaaaaaaatatagctaaccactaatttatcatgtcagtgttcgcttaacttgctagcatgatgctaatttcgtggcatggcgaaaatccgtagatctgaagagacctgcggttctttttatatagagcgaatcactcacacttgttgatgttgattcacttaatgacgtgcttgcacttgttgaatcactcacacttgttgatgctgactcacttaatgatgtgcttgcacttgttgaatcactcacacttgttgatgttgattcacttaatgatgtacttacacttgttgaatcactcacacttgttgacgttgattcacttgatgatgtgcttgcgctatttgaatcactcacgcttgttgacgttgattcacttgatgatgtgcttgcacttgttgaatcactcacgcttgttgatgttgatccacttaatgatgtgcttgcacttgttgaatcactcacacttgttgatgctgactcacttaatgatgtgcttgcacttgttgagtcactcacacttgttgatgctgactcacttaatgatgtgcttgcacttgttgaatcactcacgcttgttgatgttgatccacttaatgatgtgcttgcgcttgctgagtctgaaagactcgtacttgttgatccacttaatgacgtgcttgcgctatttgaatcgctcacacttgttgatgctgatccacttaatgatgtgcttgcacttgttgaatcactcacacttgttgatgctgactcacttaatgatgtgcttgcacttgttgaatcactcacacttgttgatgctgagtcacttgatgatgtgcttgcacttgttgaatcactcacacttgttgatgttgactcacttaatgatgtgcttgcacttgttgaatcactcacacttgttgatgctgactcacttaatgatgtgcttgcacttgttgaatcactcacgcttgttgatgctgagtcacttgatgatgtgcttgcacttgttgaatcactcacacttgttgatggcaagcacatcattaagtgagtcagcatcaacaagtgtgagtgactcaacaagtgcaagcacatcattaagtgcatcaacgtcaacaagtgtgagtgattcaacaagtgcaagcacatcattaagtgaatcaacatcaacaagcgtgagcgattcaaatagcgcaagcacatcatcaagtgaatcaacatcaacaagcgtgagcgattcaaatagcgcaagcacgtcattaagtggatcaacaagtacgagtctttcagactcagcaagcgcaagcacatcattaagtgagtcagcatcaacaagcgtgagtgattcaacaagtgcaagcacatcattaagtgagtcagcatcaacaagtgtgagtgactcaacaagtgcaagcacatcattaagtgcatcaacgtcaacaagcatgagtgattcaacaagtgcaagtacatcattaagtgagtcaacatcaacaagtgtgagtgattcaacaagtgcaagcacatcatcaagtgactcagcatcaacaagcgtgagtgattcaacaagtgcaagcacatcattaagtgagtcagcatcaacaagtgtgagtgaattttatatcaaatttggaagaaaaagcataaaaaagcttattacaaatggcgtattgatgagacgtacatcaaaataaaaggaaaatggagttatttatatcgtgccattgatgcagagggacatacattagatatttggttgcgtaagcaacgagataatcattcagcatatgcgtttatcaaacgtctcattaaacaatttggtaaacctcaaaaggtaattacagatcaggcaccttcaacgaaggtagcaatggctaaagtaattaaagcttttaaacttaaaccggactgtcattgtacatcgaaatatctgaataacctcattgagcaagatcaccgtcatattaaagtaagaaagacaaggtatcaaagtatcaatacagcaaagaatactttaaaaggtattgaatgtatttacgctctatataaaaagaaccgcaggtctcttcagatctacggattttcgccatgccacgaaattagcatcatgctagcaagttaagcgaacactgacatgataaattagtggttagctatattttttgtgcttgcacttgttgaatcactcacacttgttgatgctgactcacttaatgatgtgcttgcacttgttgaatcactcacacttgttgacgttgattcacttgatgatgtgcttgcacttgttgaatcactcacacttgttgatgttgattcacttaatgacgtgcttgcacttgttgaatcgctcacgcttgttgatgttgattcacttaatgacgtgcttgcacttgttgagtctgaaagactcgtacttgttgatccacttaatgacgtgcttgcgctatttgaatcgctcacgcttgttgacgttgattcacttgatgatgtgcttgcacttgttgaatcactcacacttgttgatgctgactcacttaatgatgtgcttgcacttgttgaatcactcacacttgttgacgttgatgcacttaatgatgtgcttgcacttgttgagtcactcacacttgttgacgttgatgcacttaatgatgtgcttgcacttgttga

SEQ ID NO: 40 - protein, 31 aa, Staphylococcus hominis
  misc_feature (3)..(): Dha
  misc_feature (3)..(3): Xaa can be any naturally occurring amino acid
  misc_feature (8)..(): Dhb
  misc_feature (8)..(8): Xaa can be any naturally occurring amino acid
  misc_feature (16)..(): Abu
  misc_feature (16)..(16): Xaa can be any naturally occurring amino acid
  misc_feature (18)..(): Abu
  misc_feature (18)..(18): Xaa can be any naturally occurring amino acid
  misc_feature (26)..(): Abu
  misc_feature (26)..(26): Xaa can be any naturally occurring amino acid
  misc_feature (28)..(): Abu
  misc_feature (28)..(28): Xaa can be any naturally occurring amino acid
KKXFAQKXGNDGKHAXIXWEASIAPXKXAWA

SEQ ID NO: 41 - protein, 31 aa, Staphylococcus hominis
  misc_feature (8)..(8): Dha
  misc_feature (9)..(9): Dhb
  misc_feature (14)..(14): Dhb
  misc_feature (19)..(19): Abu
KGKGGGFXXVTVVXPIVPXSKAAAIVKPANK

SEQ ID NO: 42 - protein, 34 aa, Staphylococcus hominis
  misc_feature (1)..(): Dhb
  misc_feature (1)..(1): Xaa can be any naturally occurring amino acid
  misc_feature (4)..(): Dhb
  misc_feature (4)..(4): Xaa can be any naturally occurring amino acid
  misc_feature (17)..(): Dhb
  misc_feature (17)..(17): Xaa can be any naturally occurring amino acid
  misc_feature (22)..(): Abu
  misc_feature (22)..(22): Xaa can be any naturally occurring amino acid
XHPXVVPVAAAVAGVAXKLVPXSKAAAIVKPANK

SEQ ID NO: 43 - protein, 30 aa, Enterococcus faecium
KCPWWNLSCHLGNDGKICTYSHECTAGCNA

SEQ ID NO: 44 - protein, 29 aa, Lactobacillus plantarum
KCKWWNISCDLGNNGHVCTLSHECQVSCN

SEQ ID NO: 45 - protein, 30 aa, Lactobacillus delbrueckii
CSTNTFSLSDYWGNNGAWCTLTHECMAWCK

SEQ ID NO: 46 - protein, 30 aa, Staphylococcus aureus
CSTNTFSLSDYWGNKGNWCTATHECMSWCK

SEQ ID NO: 47 - protein, 33 aa, Streptococcus mutans
IGTTVVNSTFSIVLGNKGYICTVTVECMRNCSK

SEQ ID NO: 48 - protein, 32 aa, Streptococcus rattus
IGTTVVNSTFSIVLGNKGYICTVTVECMRNCQ

SEQ ID NO: 49 - protein, 32 aa, Bacillus lichenicidin
TITLSTCAILSKPLGNNGYLCTVTKECMPSCN

SEQ ID NO: 50 - protein, 28 aa, Bacillus halodurans
CAWYNISCRLGNKGAYCTLTVECMPSCN

SEQ ID NO: 51 - protein, 28 aa, Bacillus paralicheniformis
CEWYNISCQLGNKGQWCTLTKECQRSCK

SEQ ID NO: 52 - protein, 36 aa, Staphylococcus hominis
ESEIRKKSFSQKTGNDGKHCTITWECSICPTKTCWC

SEQ ID NO: 53 - protein, 32 aa, Lactobacillus plantarum
SGIPCTIGAAVAASIAVCPTTKCSKRCGKRKK

SEQ ID NO: 54 - protein, 27 aa, Lactobacillus delbrueckii
PATPAISILSAYISTNTCPTTKCTRAC

SEQ ID NO: 55 - protein, 12 aa, Bacillus licheniformis
TTPATTSSWTCI

SEQ ID NO: 56 - protein, 20 aa, Bacillus licheniformis
TAGVTVSASLCPTTKCTSRC

SEQ ID NO: 57 - protein, 8 aa, Bacillus paralicheniformis
TTPSSLPC

SEQ ID NO: 58 - protein, 18 aa, Bacillus paralicheniformis
GTLVTAVWCPSNACTSDC

SEQ ID NO: 59 - protein, 21 aa, Enterococcus faecalis
TTPACFTIGLGVGALFSAKFC

SEQ ID NO: 60 - protein, 20 aa, Unknown
  Bacillus sp.
CTFTLPGGGGVCTLTSECIC

SEQ ID NO: 61 - protein, 26 aa, Unknown
  Geobacillus
TIVCVSLRICNWSLRFCPSFKVKCPM

SEQ ID NO: 62 - protein, 6 aa, Bacillus halodurans
TTWPCA

SEQ ID NO: 63 - protein, 4 aa, Bacillus halodurans
TVGV

SEQ ID NO: 64 - protein, 14 aa, Bacillus halodurans
SVALCPTTKCTSQC

SEQ ID NO: 65 - protein, 9 aa, Staphylococcus hominis
THPTVVPVS

SEQ ID NO: 66 - protein, 25 aa, Staphylococcus hominis
AAVCGVATKLVPTSKCASIVKPCNK

SEQ ID NO: 67 - protein, 6 aa, Staphylococcus hominis
KGKGGG

SEQ ID NO: 68 - protein, 25 aa, Staphylococcus hominis
FSTVTVVTPIVPTSKCASIVKPCNK

SEQ ID NO: 69 - protein, 26 aa, Unknown
  Geobacillus
TIVCVSLRICNWSLRFCPSFKVKCPM

SEQ ID NO: 70 - protein, 21 aa, Enterococcus faecalis
TTPACFTIGLGVGALFSAKFC

SEQ ID NO: 71 - protein, 20 aa, Unknown
  Bacillus sp.
CTFTLPGGGGVCTLTSECIC

SEQ ID NO: 72 - protein, 6 aa, Bacillus halodurans
TTWPCA

SEQ ID NO: 73 - protein, 4 aa, Bacillus halodurans
TVGV

SEQ ID NO: 74 - protein, 14 aa, Bacillus halodurans
SVALCPTTKCTSQC

SEQ ID NO: 75 - protein, 8 aa, Bacillus paralicheniformis
TTPSSLPC

SEQ ID NO: 76 - protein, 18 aa, Bacillus paralicheniformis
GTLVTAVWCPSNACTSDC

SEQ ID NO: 77 - protein, 12 aa, Bacillus licheniformis
TTPATTSSWTCI

SEQ ID NO: 78 - protein, 20 aa, Bacillus licheniformis
TAGVTVSASLCPTTKCTSRC

SEQ ID NO: 79 - protein, 32 aa, Lactobacillus plantarum; identical to SEQ ID NO: 53

SEQ ID NO: 80 - protein, 27 aa, Lactobacillus delbrueckii
PATPAISILSAYISTNTCPTTKCTRAC

SEQ ID NO: 81 - protein, 8 aa, Staphylococcus hominis
THPTVVPV

SEQ ID NO: 82 - protein, 26 aa, Staphylococcus hominis
SAAVCGVATKLVPTSKCASIVKPCNK
